(19) United States
(12) Patent Application Publication
(10) Pub. No.: US 2022/0033460 A1
(43) Pub. Date: Feb. 3, 2022

(54) IDENTIFICATION AND USE OF T CELL EPITOPES IN DESIGNING DIAGNOSTIC AND THERAPEUTIC APPROACHES FOR COVID-19

(71) Applicants: Repertoire Immune Medicines, Inc., Cambridge, MA (US); Repertoire Immune Medicines (Switzerland) Ltd., Schlieren (CH)

(72) Inventors: Daniel Pregibon, Cambridge, MA (US); Joshua Francis, Weymouth, MA (US); Del Leistritz-Edwards, Weston, MA (US); William Dunn, Boston, MA (US); Violeta Rayon Estrada, Brookline, MA (US); Gang Liu, Cary, NC (US); Jan Kisielow, Schlieren (CH); Franz-Josef Obermair, Oberengstringen (CH)

(21) Appl. No.: 17/397,841

(22) Filed: Aug. 9, 2021

Related U.S. Application Data
(63) Continuation of application No. PCT/US21/44063, filed on Jul. 30, 2021.
(60) Provisional application No. 63/059,144, filed on Jul. 30, 2020.
(60) Provisional application No. 63/089,487, filed on Oct. 8, 2020.
(60) Provisional application No. 63/148,475, filed on Feb. 11, 2021.
(60) Provisional application No. 63/154,878, filed on Mar. 1, 2021.
(60) Provisional application No. 63/155,107, filed on Mar. 1, 2021.
(60) Provisional application No. 63/178,377, filed on Apr. 22, 2021.
(60) Provisional application No. 63/178,383, filed on Apr. 22, 2021.

(51) Int. Cl. C07K 14/725; A61K 39/215; C12N 5/0783; C07K 14/74; A61K 35/17

(52) U.S. Cl. CPC C07K 14/7051; A61K 39/215; A61K 35/17; C07K 14/70539; C12N 5/0636

(57) ABSTRACT

Approaches for identifying T cell epitopes from SARS-CoV-2 are provided, along with the use of such T cell epitopes diagnostically and therapeutically. Compositions including T cell epitope vaccines and T cell epitope-display reagents are provided. Methods for identifying SARS-CoV-2 T cell epitopes, methods of identifying reactive T cells and methods of using epitopes and T cells for diagnostic purposes, such as identifying particular patient subpopulations are provided. Treatment methods, including administration of T cell epitope vaccines prophylactically and administration of activated T cells therapeutically are also provided.

### CROSS-REFERENCE TO RELATED APPLICATIONS

[0001] This application claims the benefit of and priority to U.S. Provisional Patent Application No. 63/059,144, filed on Jul. 30, 2020; U.S. Provisional Patent Application No. 63/089,487, filed on Oct. 8, 2020; U.S. Provisional Patent Application No. 63/178,377, filed on Apr. 22, 2021; U.S. Provisional Patent Application No. 63/148,475, filed on Feb. 11, 2021; U.S. Provisional Patent Application No. 63/154,878, filed on Mar. 1, 2021; U.S. Provisional Patent Application No. 63/155,107, filed on Mar. 1, 2021; and U.S. Provisional Patent Application No. 63/178,383, filed on Apr. 22, 2021, the disclosure of each of which is hereby incorporated by reference in its entirety for all purposes.

### SEQUENCE LISTING

[0002] The instant application contains a Sequence Listing which has been submitted electronically in ASCII format and is hereby incorporated by reference in its entirety. Said ASCII copy, created on Jul. 30, 2021, is named REPT-108WO_SL.txt and is 1,092,029 bytes in size.

### BACKGROUND OF THE INVENTION

[0003] Coronavirus Disease of 2019 (COVID-19) can lead to a severe acute respiratory syndrome (SARS) characterized by high fever, dry cough, fatigue, dyspnea, headache, frequent mild lymphopenia, hypoxemia, and characteristic pneumonia (Wu et al. (2020) Nature, 579:265-269; Lai et al. (2020) Int. J. Antimicrob. Agents, 55:105924; Zhou et al. (2020) Lancet, 395:P1054-1062). Meta-transcriptomic RNA sequencing of patient bronchoalveolar lavage fluid (BALF) or sputum has identified the likely causative agent as SARS-CoV-2, a novel betacoronavirus genus RNA virus related to SARS-CoV and SARS-MERS, which caused major SARS and Middle East Respiratory Syndrome (MERS) pandemics with 10%-30% mortality in the past 20 years (Wu et al. (2020) supra; Zhou et al. (2020) Nature, 579:270-273; Wu et al. (2020) Cell Host Microbe, 27:325-328; Chan et al. (2020) Lancet, 395:514-523; Grifoni et al. (2020) Cell Host Microbe, 27:1-10).

[0004] With over 190 million cases and over four million deaths across many countries in the short time from the diagnosis of the first patient in Wuhan, China in December 2019 to July 2021, COVID-19 could become the largest pandemic threat humankind has faced since the Spanish Flu (Johns Hopkins University Coronavirus Resource Center, 2021). High transmission rates, transmission by asymptomatic patients, high (˜15%) proportions of patients with severe disease, and mortality rates of up to 8% in some regions make this disease particularly dangerous. The elderly, individuals with co-morbidities, and an ill-understood subgroup of younger patients develop more severe disease with higher mortality rates (Lai et al. (2020) Int. J Antimicrob. Agents, 55:105924; Zhou et al. (2020) supra; Chan et al. (2020) Lancet, 395:514-523; Wang et al. (2020) Clin. Infect. Dis., 71:769-777).

[0005] The development of safe and effective therapies, in particular prophylactic vaccines, has become a critical tool in the management of the COVID-19 pandemic. Three different vaccines have been developed and approved for emergency use in the United States including two mRNA vaccines containing mRNA encoding viral spike glycoproteins of SARS-CoV-2 by Moderna and BioNTech/Pfizer, and an adenoviral vector vaccine modified to express the spike protein of SARS-CoV-2 by Johnson and Johnson. Nevertheless, multiple lines of evidence suggest important roles for T cells in productive immune responses to COVID-19. It has been observed that, in many SARS patients, B cell responses have been relatively short lived (1-2 years) and prone to antigen escape, raising the possibility of re-infection.

[0006] In contrast, T cell memory in survivors can be long-lived (>6-17 years) (Vabret et al. (2020) Immunity, 52:910-941; Zhao et al. (2016) Immunity, 44:1379-1391; Bert et al. (2020) bioRxiv 2020.2005.2026.115832). It is well known that T cells can engage antigen epitopes that are not targeted by B cells, including those derived from intracellular proteins, to provide broader protection which the virus can less easily circumvent through mutation (Zhao et al. (2016) Immunity, 44:1379-1391). T cells are especially necessary to clear severe virus infections. In addition to neutralizing antibody responses, a broad and long-lasting antiviral immunity requires the co-enrollment of CD4 and CD8 T cells and the generation of T cell memory (Zhao et al. (2016) Immunity, 44:1379-1391; Channappanavar and Perlman (2014) Immunol. Res. 59:118-128; Li et al. (2008) J. Immunol. 181:5490-5500; Vardhana and Wolchok (2020) J. Exp. Med., 217:e20200678; Channappanavar et al. (2014) J. Virol., 88:11034-11044).

[0007] Accordingly, there remains a need for identification of SARS-CoV-2 T cell epitopes, as well as approaches for using such epitopes in the diagnosis and treatment of COVID-19.

### SUMMARY OF THE INVENTION

[0008] The disclosure provides identified, isolated peptides comprising T cell epitopes from SARS-CoV-2 (see, e.g., TABLE 1 and TABLE 2, hereinbelow) together with an identification of the MHC class I molecules on antigen presenting cells that present the peptides to corresponding TCRs on CD8+ T cells. The disclosure also provides identified, isolated peptides comprising T cell epitopes from SARS-CoV-2 (see, e.g., TABLE 3 hereinbelow) together with an identification of the MHC class II molecules on antigen presenting cells that present the peptides to corresponding TCRs on CD4+ cells. The studies disclosed herein show the relationship of specific T cell epitopes to specific MHC molecules on antigen presenting cells and specific T cell receptors on specific T cells, which heretofore has not been possible on such a scale.

[0009] In one aspect, the disclosure provides an isolated peptide comprising a SARS-CoV-2 T cell epitope comprising an amino acid sequence set forth in TABLE 1, wherein the peptide is no more than 100 amino acids in length, and an optional pharmaceutically acceptable carrier. The T cell epitope can be a CD8+ epitope. In certain embodiments, the T cell epitope comprises an amino acid sequence set forth in TABLE 2. T cell epitope can be specific for a subject infected with SARS-CoV-2.

[0010] In another aspect, the disclosure provides a SARS-CoV-2 T cell epitope comprising an amino acid sequence set forth in TABLE 3, wherein the peptide is no more than 100 amino acids in length, and an optional pharmaceutically acceptable carrier. The T cell epitope can be a CD4+ epitope.

[0011] In another aspect, the disclosure provides an isolated peptide comprising a SARS-CoV-2 T cell epitope, wherein the T cell epitope comprises at least 13, at least 14, at leat 15, at least 16, at least 17, or at least 18 continuous amino acids of an epitope sequence set forth in TABLE 3 or at least 8 continuous amino acids of an epitope sequence set forth in TABLE 1 or TABLE 2, wherein the peptide is no more than 100 amino acids in length, or a pharmaceutically acceptable salt thereof.

[0012] In each of the foregoing aspects, the peptide is synthetic. Furthermore, the peptide can be no more than 50, 40, 30, or 20 amino acids in length. The amino acid sequence of each of the peptides consists essentially of or consists of an amino acid sequence set forth in (i) TABLE 1, (ii) TABLE 2, or (iii) TABLE 3. Under certain circumstances, the isolated peptide comprises an amino acid sequence set forth in TABLE 1 or TABLE 2, or at least 8 continuous amino acids thereof, and is presentable by a major histocompatibility complex (MHC) Class I molecule. Similarly, under certain circumstances, peptide comprises an amino acid sequence set forth in TABLE 3, or at least 13 continuous amino acids thereof, and is presentable by a MHC Class II molecule.

[0013] In another aspect, the disclosure provides a pharmaceutical composition comprising a peptide, e.g., a synthetic peptide, disclosed herein and a pharmaceutically acceptable carrier or excipient. The pharmaceutical composition optionally comprises a plurality of peptides (e.g., 2, 3, 4, 5, 6, 7, 8, 9, 10, or more) disclosed herein and a pharmaceutically acceptable carrier or excipient.

[0014] In another aspect, the disclosure provides a pharmaceutical composition comprising a nucleic acid, e.g., a synthetic nucleic acid, encoding the peptide disclosed herein and a pharmaceutically acceptable carrier or excipient. The pharmaceutical composition comprises one or more nucleic acids encoding a plurality of peptides (e.g., 2, 3, 4, 5, 6, 7, 8, 9, 10, or more) disclosed herein and a pharmaceutically acceptable carrier or excipient.

[0015] Each of the foregoing pharmaceutical compositions, can comprise liposome or lipid nanoparticle, wherein the peptide or nucleic acid encoding the peptide is disposed within the liposome or lipid nanoparticle. The pharmaceutical optionally further comprises an immunogenicity enhancing adjuvant.

[0016] In another aspect, the disclosure provides a vaccine that stimulates a T cell mediated immune response when administered to a subject, the vaccine comprising one of the foregoing peptides or pharmaceutical compositions. The vaccine can be a priming vaccine, a booster vaccine, or can function as both a priming vaccine and a booster vaccine. The vaccine can be a pan-coronavirus vaccine which is capable of eliciting an immune response against a plurality of coronaviruses, where one of the viruses can be SARS-CoV-2.

[0017] In each of the foregoing pharmaceutical compositions or vaccines, the compositions or vaccines can comprise one or more CD4 epitopes (i.e., T cell epitopes that is presentable by an MHC class II and capable of stimulating a CD4+ T cell response), one or more CD8 epitopes (i.e., T cell epitopes that is presentable by an MHC class I and capable of stimulating a CD8+ T cell response), or one or more CD4 epitopes and one or more CD8 epitopes.

[0018] In another aspect, the disclosure provides a method of stimulating a T cell immune response to SARS-CoV-2 in a subject in need thereof. The method comprises administering to the subject an effective amount of any one of the foregoing pharmaceutical compositions or vaccines. In certain embodiments, the subject expresses an MHC Class I and/or an MHC Class II that binds the epitope.

[0019] In another aspect, the disclosure provides a method of presenting a T cell epitope on the surface of an antigen-presenting cell (APC). The method comprises contacting the APC in vitro with any one or more of the peptides disclosed herein, wherein the APC expresses the MHC Class II. In another aspect, the disclosure provides a method of presenting a T cell epitope on the surface of an APC. The method comprises transfecting the APC in vitro with one or more of nucleic acids (e.g., mRNAs) encoding one or more of the peptides disclosed herein, wherein the APC expresses the MHC Class II. The disclosure also provides an antigen presenting cell (APC) produced by any one of the foregoing methods. The APC can be a dendritic cell, monocyte, macrophage or B cell. Alternatively, the APC can be an artificial APC.

[0020] The disclosure also provides a composition comprising one of the foregoing peptides and a cognate MHC Class II molecule (e.g. HLA type DPA1*02:02 DPB1*05:01, DRB1*07:01, DRB1*14:05, DRB1*11:01, and DRB1*08:03, e.g., as set forth in TABLE 3) or an extracellular portion thereof, wherein the peptide and the MHC Class II, or the extracellular portion thereof, are combined in a complex. The disclosure also provides a method of producing activated T cells, wherein the method comprises contacting a population of T cells in vitro with such an APC or with such a complex to permit activation of one or more T cells in the population for reactivity to a SARS-CoV-2 infected cell. A population of activated T cells produced by the method is also provided. The population of T cells can comprise CD4⁺ T cells. The T cells can be cultured to facilitate expansion of the T cells in the population reactive to a SARS-CoV-2 infected cell.

[0021] In another aspect, the disclosure provides a method of stimulating a T cell immune response to SARS-CoV-2 in a subject in need thereof. The method comprises administering to the subject a composition comprising the population of such activated T cells, wherein the subject expresses the MHC Class II.

[0022] In each of the foregoing methods, APCs, compositions, or activated T cells, it is contemplated that (a) the peptide comprises the amino acid sequence of SEQ ID NO: 688, and the MHC Class II is HLA-DPA1*02:02 or HLA-DPB1*05:01; (b) the peptide comprises the amino acid sequence of SEQ ID NO: 689, and the MHC Class II is FILA-DRB1*07:01; (c) the peptide comprises the amino acid sequence of SEQ ID NO: 690, and the MHC Class II is HLA-DRB1*07:01; (d) the peptide comprises the amino acid sequence of SEQ ID NO: 691, and the MHC Class II is HLA-DRB1*07:01; (e) the peptide comprises the amino acid sequence of SEQ ID NO: 692, and the MHC Class II is HLA-DRB1*07:01; (f) the peptide comprises the amino acid sequence of SEQ ID NO: 693, and the MHC Class II is HLA-DRB1*14:05; (g) the peptide comprises the amino acid sequence of SEQ ID NO: 694, and the MHC Class II is HLA-DRB1*11:01; and/or (h) the peptide comprises the amino acid sequence of SEQ ID NO: 695, and the MHC Class II is HLA-DRB1*08:03.

[0023] In each of the foregoing methods, the T cells are autologous and/or could be obtained from a healthy donor.

[0024] In another aspect, the disclosure provides a method of presenting a T cell epitope on the surface of an APC. The method comprising contacting the APC in vitro with a peptide disclosed herein or a nucleic acid (e.g., mRNA) encoding a peptide disclosed herein, wherein the APC expresses the MHC Class I. The disclosure provides an APC produced by any one of the foregoing methods. The APC can be a dendritic cell, monocyte, macrophage or B cell. Alternatively, the APC can be an artificial APC. Also provided is a composition comprising a peptide disclosed herein and an MHC Class I (e.g. HLA type A*01:01, A*02:01, A*24:02, A*32:01, B*07:02, or B*48:01, e.g., as set forth in TABLE 1 or 2), wherein the peptide and the MHC Class I are combined in a complex.

[0025] The disclosure provides a method of producing activated T cells. The method comprises contacting a population of T cells in vitro with such an APC or complex to permit activation of one or more T cells in the population for reactivity to a SARS-CoV-2 infected cell. A population of activated T cells produced by the method is also provided. The T cells can comprise CD8⁺ T cells. The T cells can be cultured to facilitate expansion of the T cells in the population reactive to a SARS-CoV-2 infected cell. The disclosure also provides a population of activated T cell produced by one of more of the foregoing methods.

[0026] The disclosure provides a method of stimulating a T cell immune response to SARS-CoV-2 in a subject in need thereof. The method comprises administering to the subject an effective amount of a composition comprising the population of such activated T cells wherein the subject expresses MHC Class I.

[0027] In each of the foregoing methods, APCs, compositions, or populations of activated T cells, (a) the peptide comprises the amino acid sequence of SEQ ID NO: 328, and the MHC Class I is HLA-A*01:01; (b) the peptide comprises the amino acid sequence of SEQ ID NO: 286, and the MHC Class I is HLA-A*02:01; (c) the peptide comprises the amino acid sequence of SEQ ID NO: 327, and the MHC Class I is HLA-A*01:01; (d) the peptide comprises the amino acid sequence of SEQ ID NO: 326, and the MHC Class I is HLA-B*07:02; (e) the peptide comprises the amino acid sequence of SEQ ID NO: 324, and the MHC Class I is HLA-B*07:02; and/or (0 the peptide comprises the amino acid sequence of SEQ ID NO: 288, and the MHC Class I is HLA-A*02:01.

[0028] In each of the foregoing methods, the T cells are autologous and/or could be obtained from a healthy donor.

[0029] In another aspect, the disclosure provides a composition comprising an isolated APC that presents on an outer cell surface of the APC a peptide disclosed herein. In certain embodiments, the composition comprises a plurality (e.g., 2, 3, 4, 5, 6, 7, 8, 9, 10, 11, 12, 13, 14, 15, 16, 17, 18, 19, 20, or more) of such APCs that present different peptides.

[0030] In certain embodiments, the isolated APC presents on an outer cell surface of the APC a peptide comprising a SARS-CoV-2 T cell epitope comprising an amino acid sequence set forth in TABLE 1, wherein the peptide is no more than 100 amino acids in length, and an optional pharmaceutically acceptable carrier. In certain embodiments, the T cell epitope is a CD8+ epitope with an amino acid sequence set forth in TABLE 2 and is presented by major histocompatibility complex (MHC) class I on the surface of the APC. In certain embodiments, the T cell epitope is specific for a subject infected with SARS-CoV-2.

[0031] In certain embodiments, the composition further comprises a second, different APC that presents on its outer cell surface of the APC a second, different peptide comprising a SARS-CoV-2 T cell epitope, wherein the second, different epitope optionally comprises an amino acid sequence set forth in any one of TABLE 1-3, and wherein the peptide is no more than 100 amino acids in length. In each of the foregoing APC compositions the T cell epitope comprises at least 8 continuous amino acids of an epitope sequence set forth in TABLE 1 or 2.

[0032] In certain embodiments, the isolated APC presents on an outer cell surface of the APC a peptide comprising a SARS-CoV-2 T cell epitope comprising an amino acid sequence set forth in TABLE 3, wherein the peptide is no more than 100 amino acids in length, and an optional pharmaceutically acceptable carrier. In the foregoing APC, the T cell epitope is a CD4+ T cell epitope and can be presented by a MHC class II molecule at the surface of the APC. In some embodiments, the T cell epitope comprises at least 13 continuous amino acids of an epitope sequence set forth in TABLE 3.

[0033] In certain embodiments, the composition further comprises a second different APC that presents on its outer cell surface of the APC a second, different peptide comprising a SARS-CoV-2 T cell epitope, wherein the second, different epitope optionally comprises an amino acid sequence set forth in any one of TABLES 1-3, and wherein the peptide is no more than 100 amino acids in length. In some embodiments, the peptide is no more than 30 amino acids in length or 20 amino acids in length. In any of the above composition the peptide is can be synthetic. The APC can be a dendritic cell, monocyte, macrophage or B cell. Alternatively, the APC can be an artificial APC.

[0034] In another aspect, the disclosure provides a pharmaceutical composition comprising any of the APC compositions disclosed herein and a pharmaceutically acceptable carrier.

[0035] In another aspect, the disclosure provides a composition comprising an isolated T cell that binds a peptide disclosed herein, optionally as presented by a cognate MHC disclosed herein. In certain embodiments, the composition comprises a plurality (e.g., 2, 3, 4, 5, 6, 7, 8, 9, 10, or more) of such T cells that are clonally different. In certain embodiments, the composition comprises such T cells that bind a plurality (e.g., 2, 3, 4, 5, 6, 7, 8, 9, 10, 11, 12, 13, 14, 15, 16, 17, 18, 19, 20, or more) of different peptides disclosed herein.

[0036] In certain embodiments, the T cell binds a peptide comprising a SARS-CoV-2 T cell epitope comprising an amino acid sequence set forth in TABLE 1, wherein the peptide is no more than 100 amino acids in length, and an optional pharmaceutically acceptable carrier. In certain embodiments, the T cell epitope is a CD8+ epitope with an amino acid sequence set forth in TABLE 2. In certain embodiments, the T cell epitope is specific for a subject infected with SARS-CoV-2. In each of the foregoing T cell compositions the T cell epitope can comprise at least 8 continuous amino acids of an epitope sequence set forth in TABLE 1 or 2 and the T cell can be a CD8+ T cell.

[0037] In certain embodiments, the composition further comprises a second different T cell that binds a second, different peptide comprising a SARS-CoV-2 T cell epitope, wherein the second, different epitope optionally comprises an amino acid sequence set forth in any one of TABLES 1-3, and wherein the peptide is no more than 100 amino acids in length.

[0038] In certain embodiments, the T cell binds a peptide comprising a SARS-CoV-2 T cell epitope comprising an amino acid sequence set forth in TABLE 3, wherein the peptide is no more than 100 amino acids in length, and an optional pharmaceutically acceptable carrier. In certain embodiments, the T cell epitope is a CD4+ epitope. In each of the foregoing T cell compositions the T cell epitope can comprise at least 13 continuous amino acids of an epitope sequence set forth in TABLE 3 and the T cell can be a CD4+ T cell.

[0039] In certain embodiments, the composition further comprises a second different T cell that binds a second, different peptide comprising a SARS-CoV-2 T cell epitope, wherein the second, different epitope optionally comprises an amino acid sequence set forth in any one of Tables 1-3, and wherein the peptide is no more than 100 amino acids in length.

[0040] In certain embodiments, the composition comprises a second different T cell that binds a second, different peptide comprising a SARS-CoV-2 T cell epitope, wherein the second, different epitope optionally comprises an amino acid sequence set forth in any one of TABLES 1-3, and wherein the peptide is no more than 100 amino acids in length. In some embodiments the peptide is no more than 30 amino acids in length or 20 amino acids in length. In any of the foregoing T cell compositions the peptide can be synthetic. In any of the foregoing T cell compositions the APC can be a dendritic cell, monocyte, macrophage, B cell or an artificial APC.

[0041] In another aspect, the disclosure provides a pharmaceutical composition comprising a T cell disclosed herein and a pharmaceutically acceptable carrier.

[0042] In another aspect, the disclosure provides the use of SARS-CoV-2 T cell epitopes identified by the methods described herein for designing T cell mediated therapies to treat COVID-19. For example, an identified SARS-CoV-2 T cell epitope can be used to determine the TCR sequence(s) that recognizes that epitope, and the TCR sequence(s) can then be used to design recombinant T cell therapies described hereinbelow.

[0043] In another aspect, the disclosure provides a T cell receptor (TCR), for example, an engineered TCR, having antigenic specificity for a SARS-CoV-2 antigen, the TCR have an alpha chain and a beta chain, wherein the TCR comprises corresponding CDR3 alpha and CDR3 beta sequences set forth in Table 5.

[0044] In certain embodiments, the TCR further comprises CDR1 alpha and CDR2 alpha sequences defined by the corresponding, respective alpha V gene, and CDR1 beta and CDR2 beta sequences defined by the corresponding, respective beta V gene as set forth in TABLE 5. In certain embodiments, the SARS-CoV-2 antigen is an T cell epitope.

[0045] In certain embodiments, the T cell epitope is a CD8+ T cell epitope. In certain embodiments, the TCR has antigenic specificity for the corresponding SAR-CoV-2 epitope set forth in TABLE 1. In certain embodiments, the TCR has antigenic specificity restricted by the corresponding HLA class set forth in TABLE 1.

[0046] In certain embodiments, the T cell epitope is a CD4+ T cell epitope. In certain embodiments, the TCR has antigenic specificity for the corresponding SAR-CoV-2 epitope set forth in TABLE 3. In certain embodiments, the TCR has antigenic specificity restricted by the corresponding HLA class set forth in TABLE 3.

[0047] In certain embodiments, the TCR is disposed on the surface of a T cell.

[0048] In another aspect, the disclosure provides a soluble TCR comprising the alpha chain variable region and the beta chain variable region of a TCR disclosed herein, wherein the soluble TCR does not comprise a functional transmembrane domain.

[0049] In another aspect, the disclosure provides a pharmaceutical composition comprising a TCR or soluble TCR disclosed herein and a pharmaceutically acceptable carrier.

[0050] In another aspect, the disclosure provides an engineered T cell, wherein the engineered T cell is transduced with one or more exogenous nucleic acid sequences that encode an engineered TCR disclosed herein.

[0051] In certain embodiments, the T cell is a CD8+ T cell. In certain embodiments, the T cell is a CD4+ T cell. In certain embodiments, the T cell is an autologous cell. In certain embodiments, the T cell is an allogeneic cell.

[0052] In another aspect, the disclosure provides a pharmaceutical composition comprising a T cell disclosed herein a pharmaceutically acceptable carrier.

[0053] In another aspect, the disclosure provides a method of ameliorating a symptom of SARS-CoV-2 infection in a subject in need thereof, the method comprising administering to the subject an effective amount of a pharmaceutical composition disclosed herein, thereby to ameliorate the symptom.

[0054] In another aspect, the disclosure provides a SARS-CoV-2 T cell epitope library comprising at least 500 peptide moieties, wherein said library comprises peptides moieties containing identified mutations in SARS-Co-V2 spike protein and optionally peptide moieties from at least one of the following categories:
[0055] (a) 8mer-12mer peptides (e.g., 9mer peptides) of SARS-CoV-2 full proteome (e.g., peptide having an IC50, measure or predicted, of less than 500 nM for one or multiple MHC alleles);
[0056] (b) peptides of SARS-CoV comprising a sequence at least 90% (or at least 95%, 96%, 97%, 98% or 99%) identical to homologous SARS-CoV-2 sequences;
[0057] (c) peptides from common cold coronaviruses;
[0058] (d) peptides comprising immunodominant epitopes of SARS-CoV (e.g., identified from the Immune Epitope Database (IEDB);
[0059] (e) SARS-Co-V2 peptides with predicted glycosylation sites;
[0060] (f) peptide highly conserved across multiple coronavirus species or strains;
[0061] (g) peptides of non-structural proteins with low observed mutation rates;
[0062] (h) peptides against which T cell reactivity has been detected in abundance in patients with mild disease but not severe disease (e.g., patient that perished or required ventilation);
[0063] (i) peptides against which T cell reactivity has been detected in abundance in asymptomatic patients but not symptomatic patients; and
[0064] (j) peptides that show T cell reactivity with broad clonal diversity in recovered patients.

[0065] In certain embodiments, the library comprises 9-mer peptides of SARS-CoV-2 full proteome. The 9-mer peptides optionally have an IC₅₀ of less than 500 nM.

[0066] In another aspect, the disclosure provides a MHC multimer library, where the library comprising MHC multimers loaded with the foregoing SARS-CoV-2 T cell epitope library. The MHC multimer library can comprise MHC Class I multimers and/or MHC Class II multimers. In certain embodiments, the disclosure provides a kit for identifying a T cell reactive to a SARS-CoV-2 T cell epitope. The kit comprises such an MHC multimer library packaged with instructions for use of the library so as to identify a T cell reactive to a SARS-CoV-2 T cell epitope.

[0067] The disclosure provides a method of identifying a T cell reactive to a SARS-CoV-2 T cell epitope. The method comprises contacting a sample of T cells with such a MHC multimer library and identifying a T cell within the sample that binds to at least one member of the MHC multimer library to thereby identify a T cell reactive with a SARS-CoV-2 T cell epitope. The disclosure also provides a method of identifying a SARS-CoV-2 T cell epitope. The method comprises contacting a T cell sample with such a MHC multimer library, identifying a T cell that binds to at least one member of the MHC multimer library, and determining the sequence of the peptide loaded onto the MHC multimer to which the T cell binds to thereby identify a SARS-CoV-2 T cell epitope. The disclosure provides a method of identifying a T cell immune response in a COVID-19 subject. The method comprises contacting a sample of T cells from the COVID-19 subject with such an MHC multimer library and identifying a T cell within the sample that binds to at least one member of the MHC multimer library to thereby identify a T cell immune response in the COVID-19 subject. The methods optionally further comprise determining the sequence of the peptide(s) loaded onto the MHC multimer(s) to which the T cell binds to thereby determine the antigenic specificity of the T cell response in the COVID-19 subject. Alternatively or in addition, the method further comprises selecting a treatment regimen for the subject with COVID-19 based on the antigenic specificity of the T cell response in the subject.

[0068] In another aspect, the disclosure provides a method of determining whether a subject has COVID-19. The method comprises detecting the presence and/or amount of (i) one or more peptides disclosed herein and/or (ii) T cells reactive with one or more peptides of any of the peptides disclosed herein, in a sample harvested from the subject thereby to determine whether the subject has COVID-19.

[0069] In another aspect, the disclosure provides a method of determining the potential severity of a COVID-19 infection in a subject. The method comprises detecting the presence and/or amount of (i) one or more peptides disclosed herein and/or (ii) T cells reactive with one or more peptides disclosed herein, in a sample harvested from the subject thereby to determine the potential severity of the COVID-19 infection. The method optionally further comprises selecting a treatment regimen based upon the potential severity of the COVID-19 infection.

[0070] In another aspect, the disclosure provides a method of determining therapeutic intervention of a subject with COVID-19. The method comprises detecting the presence and/or amount of one or more peptides disclosed herein in a sample harvested from the subject, wherein the presence and/or amount of the peptides is used to determine the therapeutic intervention for the subject.

[0071] In each of the foregoing methods of determining whether a subject has COVID-19, determining the potential severity of a COVID-19 infection, or determining therapeutic intervention of a subject with COVID-19, the presence or amount of the T cells can be determined by a PCR reaction, tetramer assay, Enzyme Linked Immuno Spot Assay (ELISpot), or an Activation Induced Marker (AIM) assay; the presence or amount of the peptide can be determined by an assay using binding moieties (e.g., antibody or soluble TCR that binds the peptide, optionally as presented by a cognate MHC, for example, on an outer surface of a cell) or by mass spectrometry. In certain embodiments, the sample is a tissue or body fluid sample harvested from the subject.

[0072] For a fuller understanding of the nature and advantages of the present disclosure, reference should be had to the ensuing detailed description taken in conjunction with the accompanying figures. The present disclosure is capable of modification in various respects without departing from the present disclosure. Accordingly, the figures and description of these embodiments are not restrictive.

### BRIEF DESCRIPTION OF THE FIGURES

[0073] The novel features of the invention are set forth with particularity in the appended claims. A better understanding of the features and advantages of the present invention will be obtained by reference to the following detailed description that sets forth illustrative embodiments, in which the principles of the invention are utilized, and the accompanying drawings of which:

[0074] FIG. 1 exemplifies various click chemistry handles and reactions.

[0075] FIG. 2 illustrates various peptide exchange methods for HLA molecules.

[0076] FIG. 3A-3E show an exemplary SDS-PAGE or Western Blot analysis of conjugation reactions. Cartoon images depict SAv tetramer linked to one, two, three or four HLA molecules. Arrows indicate undesired side-products. FIG. 3A: Anti-His Western Blot analysis of SAv-conjugation reaction. A description of each lane is shown in the table. The extent of reaction is approximately 94-97% based on comparison with reference SA protein. FIG. 3B: SDS-PAGE image of HLA-A2-DBCO-SAv-Az. Lane 1: SeeBlue Plus Protein Standard, Lane 2: SA-Az (non-boiled), Lane 3: SA-Az (boiled) Lane 4: HLA-A2-DBCO-SAv-Az (non-boiled, non-reduced), Lane 5: HLA-A2-DBCO-SAv-Az (boiled, reduced). FIG. 3C: SDS-PAGE image of HLA-A2-Az-SAv-DBCO. Lane 1: SeeBlue Plus Protein Standard, Lane 2: HLA-A2-Az (non-boiled), Lane 3: HLA-A2-Az-SAv-DBCO, (non-boiled), Lane 4-7: HLA-A2-Az-SAv-DBCO reactions (non-boiled). FIG. 3D: SDS-PAGE image of HLA-A2-Alk-SAv-Az. Lane 1: SeeBlue Plus Protein Standard, Lane 3: HLA-A2-Alk-SAv-Az (non-boiled, non-reduced), Lane 5: HLA-A2-Alkyne-SAv-Az (boiled, reduced). FIG. 3E: SDS-PAGE images of HLA-A*01:01, HLA-A*03:01 and HLA-A*24:02 in the Conjugated Tetramer format. Samples were either non-boiled/non-reduced (NB/NR) or boiled/reduced (boiled/R).

[0077] FIG. 4. SDS-PAGE analysis of the intein splicing reaction between HLA-A2-N-intein/β2m/peptide complex and SAv-C-intein.

[0078] FIGS. 5A and 5B illustrates UV exchange monitored by differential scanning fluorimetry. FIG. 5A shows differential scanning fluorimetry (DSF) of HLA-A*02:01-Alk-SAv-Az Conjugated Tetramers produced as in Example 1 containing a placeholder GILGFVFJL peptide (SEQ ID NO:7), or after UV-exchange in the presence of excess NLVPMVATV peptide (SEQ ID NO:8), showing a 20° C. increase in stability indicative of exchange to a higher affinity peptide. FIG. 5B is a DSF of HLA-A*02 biotin-mediated tetramers produced by UV exchange on the monomer followed by tetramerization, or by UV exchange on the tetramer itself, and confirms that multimeric state has no impact on the efficiency of UV-exchange, and that multimers of the current invention have the same stability as the industry standard pMHC.

[0079] FIGS. 6A-6F depict flow cytometry after peptide exchange on biotinylated HLA-A*02 monomers and tetramers. Donor PBMCs expanded with NLVPMVGTV peptide (SEQ ID NO: 9) were stained with: Anti-CD8-BV785 and Anti-Flag-APC secondary only (FIG. 6A), 50 nM HLA-A*02 biotin-mediated tetramers loaded with placeholder peptide GILGFVFJL (SEQ ID NO:7) (FIG. 6B), 50 nM HLA-A*02 biotin-mediated tetramers refolded with NLVPMVATV peptide (SEQ ID NO:8) (FIG. 6C), 50 nM HLA-A*02 biotin-mediated tetramers loaded with NLVPMVATV peptide (SEQ ID NO: 8) via UV exchange on the monomeric form, followed by tetramerization with streptavidin (FIG. 6D), 50 nM HLA-A*02 biotin-mediated tetramers loaded with NLVPMVATV peptide (SEQ ID NO:8) via UV exchange on the tetrameric form itself (FIG. 6E) and 50 nM HLA-A*02 biotin-mediated tetramers loaded with NLVPMVATV peptide (SEQ ID NO: 8) via dipeptide exchange on the tetrameric form itself (FIG. 6F).

[0080] FIGS. 7A-7B depict flow cytometry after UV exchange on HLA-A*02:01-Alk-SAv-Az Conjugated Tetramers. Donor PBMCs expanded with NLVPMVATV peptide (SEQ ID NO: 8) were stained with: Anti-streptavidin-PE and Anti-Flag-APC secondaries only (FIG. 7A) or 1 nM HLA-A*02:01-Alk-SAv-Az Conjugated Tetramers loaded with NLVPMVATV peptide (SEQ ID NO: 8) via UV exchange directly on the tetrameric form (FIG. 7B).

[0081] FIGS. 8A-8C depict a comparison of ELISA and DSF as stability tests of UV-exchanged HLA-A*02 Tetramers. Specifically, FIG. 8A depicts an ELISA analysis of HLA-A*02:01-Alk-SAv-Az Conjugated Tetramers UV-exchanged to a 192-member peptide panel representing altered peptide ligands (APL) of the NLVPMVATV peptide (SEQ ID NO: 8). ELISA OD is plotted versus the netMHC predicted IC50 for each peptide. Different peptides span a range of ELISA signals. FIG. 8B shows DSF curves for a subset of NLVPMVATV (SEQ ID NO: 8) APL peptides UV-exchanged into biotin-mediated tetramers, demonstrating a span of stabilities. FIG. 8C shows a DSF/ELISA correlation for a subset of NLVPMVATV (SEQ ID NO: 8) APL peptides UV-exchanged into biotin-mediated tetramers.

[0082] FIGS. 9A-9D depict quality control analysis of HLA-A*01:01-Alk-SAv-Az Conjugated Tetramers. Specifically, FIG. 9A depicts an analytical SEC chromatogram of HLA-A*01:01 tetramers with low aggregate. FIG. 9B depicts an SDS-PAGE of HLA-A*01:01-Alk-SAv-Az Conjugated Tetramers non-boiled/non-reduced (NB/NR) or boiled/reduced (Boiled/R). FIG. 9C depicts DSF of HLA-A*01:01-Alk-SAv-Az Conjugated Tetramers loaded with placeholder peptide STAPGJLEY (SEQ ID NO: 16) (No UV), or after UV-exchange in the absence (UV no peptide) or presence (UV+VTEHDTLLY (SEQ ID NO: 10)) of rescue peptide. FIG. 9D depicts flow cytometry data for PBMC's expanded with VTEHDTLLY peptide (SEQ ID NO: 10), and stained with 20 nM HLA-A*01:01 biotin-mediated tetramers loaded with VTEHDTLLY peptide (SEQ ID NO: 10) by refolding (Refold VTE), HLA-A*01:01-Alk-SAv-Az Conjugated Tetramers loaded with STAPGJLEY (SEQ ID NO: 16) (No UV), or HLA-A*01:01-Alk-SAv-Az Conjugated Tetramers after UV-exchange in the presence of rescue peptide VTEHDTLLY (SEQ ID NO: 10) (UV+VTE). Both the fraction of tetramer positive cells (% Tetramer+) and mean fluorescence intensity (MFI) are depicted.

[0083] FIGS. 10A-10D depict quality control analysis of HLA-A*24:02-Alk-SAv-Az Conjugated Tetramers. Specifically, FIG. 10A depicts an analytical SEC chromatogram of HLA-A*24:02 tetramers with low aggregate. FIG. 10B depicts an SDS-PAGE of HLA-A*24:02-Alk-SAv-Az Conjugated Tetramers non-boiled/non-reduced (NB/NR) or boiled/reduced (Boiled/R). FIG. 10C depicts DSF of HLA-A*24:02-Alk-SAv-Az Conjugated Tetramers loaded with placeholder peptide VYGJVRACL (SEQ ID NO: 11) (No UV), or after UV-exchange in the absence (UV no peptide) or presence (UV+QYDPVAALF (SEQ ID NO: 12)) of rescue peptide. FIG. 10D depicts flow cytometry data for PBMC's expanded with QYDPVAALF peptide (SEQ ID NO: 12), and stained with secondary only, 20 nM HLA-A*24:02 biotin-mediated tetramers loaded with QYDPVAALF peptide (SEQ ID NO: 12) by refolding (Refold QYD), 20 nM HLA-A*24:02-Alk-SAv-Az Conjugated Tetramers loaded with VYGJVRACL (SEQ ID NO: 11) (No UV), or 20 nM HLA-A*24:02-Alk-SAv-Az Conjugated Tetramers after UV-exchange in the presence of rescue peptide QYDPVAALF (SEQ ID NO: 12) (UV+QYD). Both the fraction of tetramer positive cells (% Tetramer+) and mean fluorescence intensity (MFI) are depicted.

[0084] FIGS. 11A-11C depict quality control analysis of HLA-B*07:02-Alk-SAv-Az Conjugated Tetramers. Specifically, FIG. 11A depicts an analytical SEC chromatogram of HLA-B*07:02 tetramers with no aggregate. FIG. 11B depicts an SDS-PAGE of HLA-B*07:02-Alk-SAv-Az Conjugated Tetramers non-boiled/non-reduced (NB/NR). FIG. 11C depicts flow cytometry data for PBMC's expanded with RPHERNGFTVL peptide (SEQ ID NO: 13), and stained with secondary only, 20 nM HLA-B*07:02 biotin-mediated tetramers loaded with RPHERNGFTVL peptide (SEQ ID NO: 13) by refolding (Refold RPH), 20 nM HLA-B*07:02-Alk-SAv-Az Conjugated Tetramers loaded with AARGJTLAM (SEQ ID NO: 14), (No UV), or 20 nM HLA-B*07:02-Alk-SAv-Az Conjugated Tetramers after UV-exchange in the presence of rescue peptide RPHERNGFTVL (SEQ ID NO: 13), (UV+RPH). Both the fraction of tetramer positive cells (% Tetramer+) and mean fluorescence intensity (MFI) are depicted.

[0085] FIG. 12 depicts labeling HLA-A*02:01-Alk-SAv-Az Conjugated Tetramers with an identifying oligonucleotide tag. HLA-A*02:01-Alk-SAv-Az Conjugated Tetramers produced as described in Example 1 were incubated with 5′ biotinylated oligonucleotides and separated by Western probed with anti-Flag antibody. Shifted bands upon oligo addition indicated tetramer labeling.

[0086] FIG. 13 shows single cell sequencing of barcoded HLA-A*02:01-Alk-SAv-Az APL libraries. A heatmap of pMHC binding to individual T cells identified by single cell sequencing. Columns representing 2008 individual cells were clustered by TCR clonotype, and rows represent each of 192 APL variants of NLVPMATV (SEQ ID NO: 8). Warm colors indicate strong pMHC-TCR interactions read out by the identifying oligonucleotide tag.

[0087] FIG. 14 depicts PCR amplification of peptide-encoding template onto hydrogels under single template conditions. PCR was conducted on hydrogel beads either in bulk or after encapsulation in drops under single template conditions. Supernatant released upon breaking droplets after PCR was run next to product released from beads by Xbal or mock digest.

[0088] FIG. 15 shows the verification of single template amplification in drops. Hydrogels after PCR amplification of template in bulk or in drops under single template conditions were stained with streptavidin-PE. Fluorescent hydrogels were quantified relative to total hydrogels to confirm single template conditions.

[0089] FIGS. 16A-16B depict loading of HLA-A*02:01-Alk-SAv-Az Conjugated Tetramers onto PCR-amplified hydrogels. Signal to noise ratios for hydrogels stained with anti-Flag-APC or anti-β2M-Alexa488 after loading with Conjugated Tetramers or subsequent release with benzonase or SmaI (FIG. 16A). ELISA-determined concentrations of HLA-A*02:01-Alk-SAv-Az Conjugated Tetramers left in the supernatant after the hydrogel loading step, or released from loaded hydrogels by benzonase or SmaI (FIG. 16B).

[0090] FIGS. 17A-17B depict IVTT peptide production to generate functional UV-exchanged tetramers. Western probed with anti-SUMO domain antibody: Product of an IVTT reaction (+/−Ulp1 protease) driven by a PCR amplicon template encoding SUMO-NLVPMVATV (SEQ ID NO: 8) peptide fusion was run in lanes 10-11 (FIG. 17A). Lanes 2-9 contain a dilution series of a SUMO-domain-containing standard, which was used to quantify the yield of SUMO domain to ˜1 uM (FIG. 17A). Flow analysis of tetramers produced by UV-exchange from IVTT-produced peptide (FIG. 17B). Tetramers were UV-exchanged in the presence of equimolar synthetic NLVPMVATV (SEQ ID NO: 8) peptide (UV ex 1:1 NLV—synthetic) or an IVTT reaction (+Ulp1) driven by a SUMO-NLVPMVATV (SEQ ID NO: 8) peptide template (UV ex NLV-IVTT), and stained at 1 nM on NLVPMVATV (SEQ ID NO: 8)-expanded PBMCs (FIG. 17B). Positive and negative control tetramers refolded with NLVPMVATV (SEQ ID NO: 8) or GILGFVFJL (SEQ ID NO: 7) peptides were also stained at 1 nM as shown (FIG. 17B).

[0091] FIG. 18 is a schematic showing high throughput barcoded antigen library production using exchangeable barcodable tetramers.

[0092] FIG. 19 is a schematic showing use of sortags and click chemistry for conjugation of p*MHCII to SAy, cleavage of the peptide linker within the placeholder peptide, exchange of the placeholder peptide with a rescue peptide and binding to a TCR.

[0093] FIG. 20A-20E depicts the generation of p*MHCII multimer. FIG. 20A: Anti-Myc Western Blot analysis of GGG-Alkyne conjugation to the α-chain of monomeric p*MHCII. FIG. 20B: SDS-PAGE analysis following click reaction of p*MHCII-Alk and SAv-Az. FIG. 20C: HiLoad 26/600 Superdex 200 SEC elution chromatogram of the clicking reaction sample. FIG. 20D: Anti-FLAG Western Blot analysis of the main peaks obtained from SEC. Lane 1: Chameleon Duo Pre-Stained Protein Ladder (Licor), Lane 2: click reaction before loading the sample to the SEC column, lanes 3 and 4: SEC samples from peak I, lanes 5 and 6: SEC samples from peak II, lane 7: free SAy. Lane numbers correspond to non-boiled samples while lane numbers that are labeled with an asterisk correspond to boiled samples. FIG. 20E: Anti-His Western Blot analysis of the main peaks obtained following SEC. Lane numbers are the same as described in FIG. 20D.

[0094] FIG. 21A-21C illustrates the digestion, exchange and TCR binding of pMHCII. FIG. 21A: SDS-PAGE analysis of boiled and non-boiled samples of pre- and post-factor Xa cleavage. FIG. 21B: An ELISA assay that detects the ability of biotinylated exchanged peptide to bind to p↓MHCII multimer. FIG. 21C: BLI assay that measures the interaction between an HA-specific TCR and p↓MHCII multimer that was exchanged to display a cognate HA peptide. The black, light gray and dark gray curves correspond to the signal obtained from moving the TCR-loaded biosensors into wells containing either exchanged NMHCII, non-exchanged p*MHCII and BLI buffer, respectively. The dashed line defines the transfer of the biosensors to wells that are devoid of analytes (dissociation).

[0095] FIG. 22A-22B show results of MCR analysis of SARS-CoV-2 Spike Protein epitopes using HLA Class II DRB 1*07:01 (black), 1*04:04 (dark grey), 1*15:01 (grey) and 1*10:01 (green), with five T cell epitopes indicated in FIG. 22A (SEQ ID NOs: 271-275) and three T cell epitopes indicated in FIG. 22B (SEQ ID NOs: 276-278).

[0096] FIG. 23 show results of MCR analysis of SARS-CoV-2 Nucleocapsid Protein epitopes using HLA Class II DRB 1*07:01 (black), 1*04:04 (dark grey), 1*15:01 (grey) and 1*10:01 (green), with seven T cell epitopes indicated (SEQ ID NOs: 279-285).

[0097] FIG. 24A-24C shows analyses of SARS-CoV-2 antigen peptide library binding to six different MHC Class I alleles. FIG. 24A shows the percentage binding and total number of peptide bound by each allele. FIG. 24B shows the overlap in peptide binding between the A1101, A0101 and A0301 alleles. FIG. 24C shows the overlap in peptide binding between the A0201, A0101 and A0301 alleles.

[0098] FIG. 25 shows representative results of SARS-CoV-2 peptide-MHC tetramer library screening for A*02:01 patient samples, showing number of samples, clones or cells bound to each peptide from the indicated antigens. The sequences of the peptide epitopes are shown in SEQ ID NOs: 286-305.

[0099] FIG. 26 shows the results of mapping T cell reactive epitopes identified by peptide-MHC tetramer library screening across related viruses. The four top epitopes identified by library screening (SEQ ID NOs: 286-289) are highlighted (arrows).

[0100] FIG. 27 is a schematic diagram of the chimeric MHC/TcR receptor used in the MCR™ system.

[0101] FIG. 28 is a schematic diagram of the MCR™ system for identifying T cell epitopes.

[0102] FIG. 29 shows additional results of SARS-CoV-2 peptide-MHC tetramer library screening for A*02:01 patient samples, showing number of samples, clones or cells bound to each peptide from the indicated antigens.

[0103] FIG. 30 illustrates the abundant CD8 and CD4 T cell clonotypes from the lungs of COVID 19-infected patients and the HLA-I and HLA-II alleles tested using the MCR™ system to identify T cell epitopes.

[0104] FIG. 31A-31D illustrates results from the MCR™ system screening of patient T cells. FIG. 31A illustrates selection of a representative CD4+ T cell clonotype expressing TCR115 for analysis. FIG. 31B illustrates screening results from the MCR™ system. FIG. 31C illustrates identification of a 20mer epitope (SEQ ID NO: 306) common to multiple 23mers in the library that bound to multiple clones (SEQ ID NOs: 307-310). FIG. 31D shows results confirming that T cells expressing TCR115 strongly recognized the 20mer epitope, whereas negative control T cells expressing a different receptor (TCR117) did not.

[0105] FIG. 32 shows results of the analysis of the peptide presentation capacity of five different HLA-II molecules for four different M protein epitopes (SEQ ID NOs: 307-310) recognized by TCR115, as well as highly immunogenic control peptide (SEQ ID NO: 312).

[0106] FIG. 33 shows results of analysis of the top 20 hits from screening 9mer epitopes using peptide-MHC tetramer libraries and T cells from COVID-19 convalescent patients.

[0107] FIG. 34 shows results of analysis of the top 20 hits from screening 9mer epitopes using peptide-MHC tetramer libraries and T cells from COVID-19 unexposed subjects.

[0108] FIG. 35A-35D shows the results of MEDi analysis of Spike peptide presentation by different HLAs. FIG. 35A shows results of an exemplary flow cytometric analysis and sorting of MCR2⁺ reporter cells, transduced with an MCR2 library and stained for CD3e. Based on the surface expression of the MCR2, four fractions (neg, low, mid and hi) were sorted and re-analyzed. Positive and negative controls are indicated. FIG. 35B shows MEDi MA⁸⁵ score traces for all Spike-derived peptides presented by 5 different HLAs (thick grey line). The thin grey line oscillating around the x-axis indicates error (uncertainty factor) related to data quality of the MEDi scores (more oscillation indicates less reliable data, see Materials and Methods for detailed explanation). FIG. 35C and FIG. 35D show schematics and interpretation of the MEDi traces, with MEDi analysis for the membrane (FIG. 35C) and nucleocapsid (FIG. 35D) proteins with indicated 15aa peptides falling into an example MEDi MA⁸⁵ peak. The extended peptides are recognized by COVID-19 specific TCRs analyzed in this study.

[0109] FIG. 36A-36D show the results of experiments for MEDi analysis of Spike peptide presentation by DRB1*07:01 compared to netMHCIIpan and MHC binding IC₅₀. FIG. 36A shows sequence comparison of Spike peptides representative for the individual MEDi MA85 peaks containing at least 3 peptides. Residues matching the HLA binding consensus are highlighted in grey. FIG. 36B shows MEDi MA score traces (grey) and the error (thin light grey) for all Spike-derived peptides presented by DRB1*07:01. Arrows indicate peptides chosen for HLA-binding IC₅₀ calculation by the fluorescence polarization assay. FIG. 36C shows results of the competitive peptide binding fluorescence polarization assay for individual peptides. IC₅₀ and R² values are shown. FIG. 36D shows ROC curves of the MEDi MA and netMHCIIpan scores qualifying peptides as HLA-binders. Calculations were done for peptides analyzed in FIG. 36C, positive binding thresholds at IC₅₀ of 500 nM, 1 μM or 5 μM.

[0110] FIG. 37A-37F show results of experiments on de-orphaning TCRs from the BAL of COVID-19 patients by MCR2 screening. FIG. 37A shows a schematic diagram of the MCR workflow. FIG. 37B shows results of experiments in which MCR2-SARS-CoV-2⁺ or SCT-SARS-CoV-2⁺ 16.2× reporter cells (GFP+), carrying all possible SARS-CoV-2-derived peptides in the context of all 12 patient-specific HLA alleles (complexity up to 120.000 individual pMHC combinations) were co-cultured with 16.2A2 cells transduced with individual TCRs from patients. Responding (NFAT⁺) reporter cells were sorted, expanded and co-cultured 4 times. FIG. 37C shows results of experiments in which individual responding reporter clones were isolated and re-analyzed by an additional co-culture. FIG. 37D shows sequences of the de-orphaned TCR chains, specific peptides and HLA restriction. FIG. 37E shows results of experiments in which 16.2× reporter cells carrying the MCR2-S₇₁₄₋₇₂₈ or MCR2-N₂₂₁₋₂₄₂ were analyzed on FACS for MCR2 expression (by anti-CD3 staining). FIG. 37F shows result of experiments in which 16.2× reporter cells carrying the MCR2-S₇₁₄₋₇₂₈ or MCR2-S_{714-728(F716I)}(top) and MCR2-N₂₂₁₋₂₄₂ or MCR2-N_{221-242 (S235F)}(bottom) were co-cultured with 16.2A2 cells transduced with TCR007 or TCR132 respectively and NFAT activation was measured on FACS.

[0111] FIG. 38A-38C shows results of experiments on presentation of immunogenic peptides by MEDi. FIG. 38A and FIG. 38B show results for MEDi MA score profiles (black) compared to netMHCIIpan prediction scores (scaled to fit on the same plot, thin black) for the HLAs presenting CD4 T cell specific peptides found in this study. MEDi MA⁸⁵ is indicated as a black line, T cell specific peptides are indicated as grey shades. FIG. 38C show results for MEDi MA traces for the membrane protein presented by the indicated alleles. Results of the competitive peptide binding assay for the indicated peptides are shown below. M₁₄₆₋₁₆₅ peptide (recognized by the TCR091 in the context of DRB1*11:01) is indicated next to the shaded areas.

[0112] FIG. 39A-39H show results of experiments in which MEDi reveals candidate immune-escape mutants. FIG. 39A shows results for experiments in which micro MCR2 libraries, containing all 15 (15aa long) peptides spanning the indicated mutations were cloned for each indicated HLA and transduced into the 16.2× reporter cells. Shown are individual MEDi MA scores for the WT (dark grey) and mutated (light grey) peptides. For context MEDi traces for full ORF8 and Spike are shown. Grey shaded squares indicate differences seen in all repeat experiments (n=2 or 3). FIG. 39B shows example peptide sequences from ORF8 with indicated starting residues and the MHC binding motif for DBR1*04:04. FIG. 39C shows a detailed view of the MEDi MA scores for the WT and D1118D Spike mutated peptides in the context of DRB1*07:01. FIG. 39D shows a detailed view of the MEDi-MA scores for the WT and T716I Spike mutated peptides in the context of DRB1*07:01. FIG. 39E shows 15 peptides spanning the T716I mutation with indicated starting residues and the different DBR1*07:01binding motifs. FIG. 39F shows S₇₁₄₋₇₂₈ peptide sequences with indicated different binding registers forced by several DBR1*07:01 binding motifs present in the WT and/or mutated peptide. TCR facing residues are shown in grey. FIG. 39G shows FACS analysis and sorting of reporter cells transduced with DRB1*07:01-MCR2 carrying the 12mer peptides: S714-725, S714-725(T716I) and S717-728. FIG. 39H Reporter cells from F, were co-cultured with 16.2A2 cells transduced with TCR007 and NFAT activation was measured on FACS.

[0113] FIG. 40 shows a list of potentially presentable peptides derived from the Spike protein for four different HLA molecules.

[0114] FIG. 41 shows a list of all MHC Class I alleles carrying 10 amino acid peptides across the whole SARS-CoV-2 genome (1 aa shifts) and all MHC Class II alleles carrying 15 or 23 amino acid peptides across the whole SARS-CoV-2 genome (1 aa shifts) for different CD4 TCRs or CD8 TCRs.

[0115] FIG. 42A-42B show additional results of MEDi experiments using MHC Class II molecules DRB1*07:01 and DRB1*11:01 (FIG. 42A) or DRB1*07:01, DRB1*14:05 and DRB1*08:03 (FIG. 42B).

[0116] FIG. 43A-43D show the results of experiments for MEDi analysis of Spike peptide presentation by DRB1*15:01 compared to netMHCIIpan and MHC binding IC₅₀. FIG. 43A shows sequence comparison of Spike peptides representative for the individual MEDi MA peaks containing at least 3 peptides. Residues matching the HLA binding consensus are highlighted in grey. FIG. 43B shows MEDi MA score traces (grey) and the error (thin grey) for all Spike-derived peptides presented by DRB1*15:01. Arrows indicate peptides chosen for HLA-binding IC₅₀ calculation by the fluorescence polarization assay. FIG. 43C shows results of the competitive peptide binding fluorescence polarization assay for individual peptides. IC₅₀ and R² values are shown. FIG. 43D shows ROC curves of the MEDi MA and netMHCIIpan scores qualifying peptides as HLA-binders.

[0117] FIG. 44 shows results of the competitive peptide binding fluorescence polarization assay for the indicated peptides and MHC Class II molecules. IC₅₀ and R² values are shown.

[0118] FIG. 45A-45C show an overview of the experimental approach used to decode CD8+ response to SARS-CoV-2. FIG. 45A is a schematic of method where encoded tetramer libraries, designed independently by HLA allele to span the entire SARS-2-proteome, are used to stain enriched CD8+ cells from subject PBMCs, which are then sorted and subjected to single-cell sequencing (left). Using this approach, TCR sequence, specificity and transcriptomic features are simultaneously acquired for each cell (right). FIG. 45B shows clonotype specificity detected by HLA allele and epitope across the SARS-CoV-2 proteome. FIG. 45C shows single-cell transcriptomic analysis showing global UMAP clustering, scoring by functional gene set, and projections onto the transcriptomic UMAP for T cells with specificity toward select epitopes in convalescent individuals. QYI-A24, PTD-A01, and LLY-A02 correspond to QYIKWPWYI (SEQ ID NO: 318) in A*24:02, PTDNYITTY (SEQ ID NO: 327) in A*01:01, and LLYDANYFL (SEQ ID NO: 286) in A*02:01, respectively.

[0119] FIG. 46A-46C shows the specificity to SARS-CoV-2 epitopes across HLA, cohort, and subject. FIG. 46A shows the frequency of T cell response detected (cells per million CD8+ interrogated) by subject and cohort. FIG. 46B shows T cell specificity observed in unexposed versus convalescent cohorts represented as percentage of cohort with any detectable frequency of T cell specificity against each epitope. The size of each dot represents the mean frequency detected across convalescent and unexposed subjects. FIG. 46C shows sequence alignment between SARS-CoV-2 proteome and common cold coronaviruses, shown for select epitopes. Mismatches are represented in dark grey and HLA anchor residues with a grey background. Arrows indicate sequences where anchor and all internal residues are conserved between SARS-CoV and HCoV species.

[0120] FIG. 47A-47D show functional assays used to characterize recombinant TCR (rTCR) activation upon stimulation with SARS-CoV-2 and homologous epitopes. FIG. 47A is a schematic showing lentiviral transduction of TCRs into a J76 cell line, stimulation of APCs with synthetic peptide, and quantification of activated J76 cells expressing CD69. FIG. 47B shows dose-response curves for TCR-pMHC interactions observed across several canonical epitopes in A*02:01 and B*07:02. Shown are fractions of CD69(+) cells after a 16 hour stimulation. FIG. 47C shows functional activation of TCRs by canonical and homologous epitopes, represented by fraction of CD69(+) cells after 16 hour stimulation with 10 uM peptide. FIG. 47D shows dose-response curves for several rTCRs from COVID patients (left) or unexposed subjects (right) stimulated with peptide from SARS-CoV-2 or HCoV HKU1/OC43.

[0121] FIG. 48A-48D show analysis of TCR sequences from cells specific to the most immunodominant epitopes for each allele tested. FIG. 48A shows network plots showing TCR biochemical similarity of alpha or beta CDR3s in unexposed subjects (left) or COVID patients (right). Unique subjects are identified by node color. Each node is a unique clonotype within a subject, and the size of the node the relative frequency of response detected. Edges drawn between nodes represent CDR3 homology, and the size of each node represents relative cell frequency. FIG. 48B shows V gene usage for alpha and beta chains across all sequences represented in FIG. 48A with the most frequently used gene labeled. FIG. 48C shows distributions of CDR3 lengths. FIG. 48D shows alpha beta paired CDR3 motifs for the most interconnected nodes identified in the network analysis.

[0122] FIG. 49A-49C show transcriptomic clustering of T cells based on function-specific gene sets. FIG. 49A shows single cell gene expression of single cells specific to SARS-CoV-2, CMV, EBV, Influenza, or with no observed (N.O.) specificity. Units are ln(TP10K). Kmeans clustering was used to identify seven distinct clusters showing gene expression consistent with a range of functional states. FIG. 49B shows specificity tick strips indicating the location and cohort assignment of individual cells with specificity to CEF or SARS-CoV-2 epitopes. FIG. 49C shows gene expression of single cells with individual specificities. In cases where specificity was detected in the unexposed cohort, pie charts are shown to indicate the fraction of cells corresponding to each cluster identified in FIG. 49A.

[0123] FIG. 50A-50B shows the results of a receiver-operator analysis for TCR-pMHC hit identification.

[0124] FIG. 51 shows the results of the overall reactivity to T cells to CMV, EBV, influenza, and SARS-CoV-2 by cohort.

[0125] FIG. 52 shows the transcriptomic clustering of T cells from SARS-CoV-2 acute patients, convalescent patients, and unexposed donors. Exemplary T cell populations are shown. T cell types are indicated: naïve T cells, central memory T cell (Tcm), 127+ memory T cell, effector memory (Tem) chronically active T cells, chronically stimulated 1 T cells, chronically stimulated 2 T cells, and cytotoxic effector T cells.

[0126] FIG. 53 shows effects of SARS-CoV-2 mutations on presentability of peptides. HLA allele and SARS-CoV-2 mutations are indicated.

[0127] FIG. 54 shows an exemplary supplementary MEDi analysis of mutated peptides present in arising SARS-CoV-2 variants.

### DETAILED DESCRIPTION

### I. Definitions

[0128] All technical and scientific terms used herein, unless otherwise defined below, are intended to have the same meaning as commonly understood by one of ordinary skill in the art. Mention of techniques employed herein are intended to refer to the techniques as commonly understood in the art, including variations on those techniques or substitutions of equivalent techniques that would be apparent to one of skill in the art. While the following terms are believed to be well understood by one of ordinary skill in the art, the following definitions are set forth to facilitate explanation of the presently disclosed subject matter.

[0129] As used herein, “about” will be understood by persons of ordinary skill and will vary to some extent depending on the context in which it is used. If there are uses of the term which are not clear to persons of ordinary skill given the context in which it is used, “about” will mean up to plus or minus 10% of the particular value.

[0130] As used herein, an “altered peptide ligand” or “APL” refers to an altered or mutated version of a peptide ligand, such as an MHC binding peptide. The altered or mutated version of the peptide ligand contains at least one structural modification (e.g., amino acid substitution) as compared to the peptide ligand from which it is derived. For example, a panel of APLs can be prepared by systematic or random mutation of a known MHC binding peptide, to thereby create a pool of APLs that can be used as a library of MHC binding peptides for loading onto MHC Conjugated Multimers as described herein.

[0131] As used herein, the term “and/or” when used in the context of a list of entities, refers to the entities being present singly or in any possible combination or subcombination.

[0132] The term “antigenic determinant” or “epitope” refers to a site on an antigen to which the variable domain of a T cell receptor, an MHC molecule or antibody specifically binds. Epitopes can be formed both from contiguous amino acids or noncontiguous amino acids juxtaposed by tertiary folding of a protein. Epitopes formed from contiguous amino acids are typically retained on exposure to denaturing solvents, whereas epitopes formed by tertiary folding are typically lost on treatment with denaturing solvents. An epitope typically includes at least 3, 4, 5, 6, 7, 8, 9, 10, 11, 12, 13, 14 or 15 amino acids in a unique spatial conformation. Methods for determining what epitopes are bound by a given TCR or antibody (i.e., epitope mapping) are well known in the art and include, for example, immunoblotting and immunoprecipitation assays, wherein overlapping or contiguous peptides from the antigen are tested for reactivity with the given TCR or immunoglobulin. Methods of determining spatial conformation of epitopes include techniques in the art and those described herein, for example, x-ray crystallography nuclear magnetic resonance, cryogenic electron microscopy (cryo-EM), hydrogen deuterium exchange mass spectrometry (HDX-MS), and site-directed mutagenesis (see, e.g., Epitope Mapping Protocols in Methods in Molecular Biology, Vol. 66, G. E. Morris, Ed. (1996)). A T cell epitope refers to a portion of an antigen (e.g., antigenic protein) that binds to (interacts with or is recognized by) a T cell receptor.

[0133] The term “avidity” as used herein, refers to the binding strength of as a function of the cooperative interactivity of multiple binding sites of a multivalent molecule (e.g., a soluble multimeric pMHC-immunoglobulin protein) with a target molecule. A number of technologies exist to characterize the avidity of molecular interactions including switchSENSE and surface plasmon resonance (Gjelstrup et al., J. Immunol. 188:1292-1306, 2012); Vorup-Jensen, Adv. Drug. Deliv. Rev. 64:1759-1781, 2012).

[0134] As used herein a “barcode”, also referred to as an oligonucleotide barcode, is a short nucleotide sequence (e.g., about 1, 2, 3, 4, 5, 6, 7, 8, 9, 10, 11, or 12 nucleotides long) that identifies a molecule to which it is conjugated. Barcodes can be used, for example, to identify molecules in a reaction mixture. Barcodes uniquely identify the molecule to which it is conjugated, for example, by performing reverse transcription using primers that each contain a “unique molecular identifier” barcode. In other embodiment, primers can be utilized that contain “molecular barcodes” unique to each molecule. The process of labeling a molecule with a barcode is referred to herein as “barcoding.” A “DNA barcode” is a DNA sequence used to identify a target molecule during DNA sequencing. In some embodiments, a library of DNA barcodes is generated randomly, for example, by assembling oligos in pools. In other embodiments, the library of DNA barcodes is rationally designed in silico and then manufactured.

[0135] “Binding affinity” generally refers to the strength of the sum total of noncovalent interactions between a single binding site of a molecule (e.g., a TCR, pMHC) and its binding partner. Unless indicated otherwise, as used herein, “binding affinity” refers to intrinsic binding affinity which reflects a 1:1 interaction between members of a binding pair (e.g., TCR and antigen). The affinity of a molecule X for its partner Y can generally be represented by the dissociation constant (Kd). For example, the Kd can be about 200 nM, 150 nM, 100 nM, 60 nM, 50 nM, 40 nM, 30 nM, 20 nM, 10 nM, 8 nM, 6 nM, 4 nM, 2 nM, 1 nM, or stronger, including up to 1 μM Affinity can be measured by common methods known in the art, including those described herein. Low-affinity TCRs generally bind antigen slowly and tend to dissociate readily, whereas high-affinity TCRs generally bind antigen faster and tend to remain bound longer. A variety of methods of measuring binding affinity are known in the art, any of which can be used for purposes of the present disclosure.

[0136] The term “bioorthogonal chemistry” refers to any chemical reaction that can occur inside of living systems without interfering with native biochemical processes. The term includes chemical reactions that are chemical reactions that occur in vitro at physiological pH in, or in the presence of water. To be considered bioorthogonal, the reactions are selective and avoid side-reactions with other functional groups found in the starting compounds. In addition, the resulting covalent bond between the reaction partners should be strong and chemically inert to biological reactions and should not affect the biological activity of the desired molecule.

[0137] As used herein, the terms “carrier” and “pharmaceutically acceptable carrier” includes any and all solvents, dispersion media, coatings, antibacterial and antifungal agents, isotonic and absorption delaying agents, and the like that are physiologically compatible.

[0138] The term “chelator ligand” as used herein refers to a bifunctional conjugating moiety that covalently links a radiolabeled prosthetic group to a biologically active targeting molecule (e.g., peptide or protein). Bifunctional conjugating moiety utilize functional groups such as carboxylic acids or activated esters for amide couplings, isothiocyanates for thiourea couplings and maleimides for thiol couplings.

[0139] As used herein, the term “cleavable moiety” refers to a motif or sequence that is cleavable. In some embodiments, the cleavage moiety comprises a protein, e.g., enzymatic, cleavage site. In some embodiments, the cleavage moiety comprises a chemical cleavage site, e.g., through exposure to oxidation/reduction conditions, light/sound, temperature, pH, pressure, etc.

[0140] The term “click chemistry” refers to a set of reliable and selective bioorthogonal reactions for the rapid synthesis of new compounds and combinatorial libraries. Properties of click reactions include modularity, wideness in scope, high yielding, stereospecificity and simple product isolation (separation from inert by-products by non-chromatographic methods) to produce compounds that are stable under physiological conditions. In radiochemistry and radiopharmacy, click chemistry is a generic term for a set of labeling reactions which make use of selective and modular building blocks and enable chemoselective ligations to radiolabel biologically relevant compounds in the absence of catalysts. A “click reaction” can be with copper, or it can be a copper-free click reaction. Non-limiting examples of click chemistry handles and reactions are shown in FIG. 1.

[0141] As used herein, the term “conditions sufficient for covalent conjugation” refers to reaction conditions, including but not limited to temperature, pH and concentrations of the reaction components, that are suitable such that the desired covalent conjugation chemical reaction occurs.

[0142] As used herein, the term “Conjugated Multimer”, also referred to as a pMHC Conjugated Multimer, refers to the reaction product that results from the reaction of pMHC monomers comprising a conjugation moiety with a multimerization domain comprising a conjugation moiety, wherein the two conjugation moieties react with each other to form a covalent linkage between the pMHC monomers and the multimerization domain, thereby forming Conjugated Multimers. In one embodiment, the Conjugated Multimer is a Conjugated Tetramer, in which four pMHC monomers are reacted with the multimerization domain, through their conjugation moieties, to thereby form a tetramer. In one embodiment, the Conjugated Multimer is a pMHCI Conjugated Multimer (e.g., Tetramer), in which pMHC Class I monomers are multimerized. In one embodiment, the Conjugated Multimer is a pMHCII Conjugated Multimer (e.g., Tetramer) in which pMHC Class II monomers are multimerized.

[0143] As used herein, the term “cross-linking unit” can refer to a molecule that links to another (same or different) molecule. In some embodiments, the cross-linking unit is a monomer. In some embodiments, the cross-link is a chemical bond. In some embodiments, the cross-link is a covalent bond. In some embodiments, the cross-link is an ionic bond. In some embodiments, the cross-link alters at least one physical property of the linked molecules, e.g., a polymer's physical property.

[0144] As used herein, the term “endoprotease” refers to a protease that cleaves a peptide bond of a non-terminal amino acid.

[0145] The terms “exchangeable pMHC polypeptide”, “exchangeable pMHC multimers”, and “placeholder-peptide loaded MHC polypeptide”, which are used interchangeably herein, refer to MHC monomers and MHC multimers, comprising a placeholder peptide in the binding groove of the MHC polypeptide, and are also referred to as “p*MHC” monomers or multimers. “Exchangeable” refers to the property of a p*MHC monomer or p*MHC multimer allowing for the exchange of the placeholder peptide with an antigenic peptide. In one embodiment, the exchangeable pMHC or p*MHC polypeptide comprises an MHC Class I molecule with an MHC Class I-binding peptide in the binding groove of the MHC Class I molecule. In another embodiment, the exchangeable pMHC or p*MHC polypeptide comprises an MHC Class II molecule with an MHC Class II-binding peptide in the binding groove of the MHC Class II molecule.

[0146] A “fusion protein” or “fusion polypeptide” as used interchangeably herein refers to a recombinant protein prepared by linking or fusing two polypeptides into a single protein molecule.

[0147] The term “isolated” as applied, for example to MHC monomers herein refers to an MHC glycoprotein, which is in other than its native state, for example, not associated with the cell membrane of a cell that normally expresses MHC. This term embraces a full length subunit chain, as well as a functional fragment of the MHC monomer. A functional fragment is one comprising an antigen binding site and sequences necessary for recognition by the appropriate T cell receptor. It typically comprises at least about 60-80%, typically 90-95% of the sequence of the full-length chain. An “isolated” MHC subunit component may be recombinantly produced or solubilized from the appropriate cell source. In one embodiment, the “isolated” MHC monomer is an MHC Class I monomer, such as a soluble form of the MHC Class I heavy chain (a chain) associated with β2-microglobulin. In another embodiment, the “isolated” MHC monomer is an MHC Class II monomer, such as a soluble form of the MHC Class II α/β chains.

[0148] As used herein, the term “identifier” refers to a readable representation of data that provides information, such as an identity, that corresponds with the identifier.

[0149] As used herein, the terms “linked,” “conjugated,” “fused,” or “fusion,” are used interchangeably when referring to the joining together of two more elements or components or domains, by whatever means including recombinant or chemical means.

[0150] The term “Major Histocompatibility Complex” or “MHC” refers to genomic locus containing a group of genes that encode the polymorphic cell-membrane-bound glycoproteins known as MHC class I and class II molecules that regulate the immune response by presenting peptides of fragmented proteins to circulating cytotoxic and helper T lymphocytes, respectively. In humans, this group of genes is also called the “human leukocyte antigen” or “HLA” system. Human MHC class I genes encode, for example, HLA-A, HL-B and HLA-C molecules. HLA-A is one of three major types of human MHC class I cell surface receptors. The others are HLA-B and HLA-C. The HLA-A protein is a heterodimer, and is composed of a heavy α chain and smaller β chain. The α chain is encoded by a variant HLA-A gene, and the β chain is an invariant β2 microglobulin (β2m) polypeptide. The β2 microglobulin polypeptide is coded for by a separate region of the human genome. For example, HLA-A*02 (A*02) is a human leukocyte antigen serotype within the HLA-A serotype group. The serotype is determined by the antibody recognition of the α2 domain of the HLA-A α-chain. For A*02, the α chain is encoded by the HLA-A*02 gene and the β chain is encoded by the B2M locus. Other exemplary HLA serotypes include HLA-A*01:01, HLA-A*02:01, HLA-A*24:02, HLA-B*07:02, A*32:01, B*48:01, and the other HLAs identified in TABLEs 1 and 2. Human MHC class II genes encode, for example, HLA-DPA1, HLA-DPB1, HLA-DQA1, HLA-DQB1, HLA-DRA and HLA-DRB1. Exemplary MHC class II serotypes include DPA1*02:02, DPB1*05:01, DRB1*07:01, DRB1*14:05, DRB1*11:01, DRB1*08:03, and the other HLAs identified in TABLEs 3 and 4. The complete nucleotide sequence and gene map of the human major histocompatibility complex is publicly available (e.g., The MHC sequencing consortium, Nature 401:921-923, 1999).

[0151] As used herein, the terms “MHC molecule” and “MHC protein” are used herein to refer to the polymorphic glycoproteins encoded by the MHC class I and MHC class II genes, which are involved in the presentation of peptide epitopes to T cells. The terms “MHC class I” or “MHC I” are used interchangeably to refer to protein molecules comprising an a chain composed of three domains (α1, α2 and α3), and a second, invariant (β2-microglobulin. The α3 domain is transmembrane, anchoring the MHC class I molecule to the cell membrane. Antigen-derived peptide epitopes, which are located in the peptide-binding groove, in the central region of the α1/α2 heterodimer. MHC Class I molecules such as HLA-A are part of a process that presents short polypeptide antigens to the immune system. These polypeptides are typically 8-11 amino acids in length and originate from proteins being expressed by the cell. MHC class I molecules present antigen to CD8+ cytotoxic T cells. The terms “MHC class II” and “MHC II” are used interchangeably to refer to protein molecules containing an a chain with two domains (α1 and α2) and a β chain with two domains (β1 and β2). The peptide-binding groove is formed by the α1/β1 heterodimer. MHC class II molecules present polypeptide antigens to specific CD4+ T cells. These antigens can be 13-25 amino acids long, but typically are 15-24 amino acids long. Antigens delivered endogenously to APCs are processed primarily for association with MHC class I. Antigens delivered exogenously to APCs are processed primarily for association with MHC class II.

[0152] As used herein, MHC proteins (MHC Class I or Class II proteins) also includes MHC variants which contain amino acid substitutions, deletions or insertions and yet which still bind MHC peptide epitopes (MHC Class I or MHC Class II peptide epitopes). The term also includes fragments of all these proteins, for example, the extracellular domain, which retain peptide binding.

[0153] The term “MHC protein” also includes MHC proteins of non-human species of vertebrates. MHC proteins of non-human species of vertebrates play a role in the examination and healing of diseases of these species of vertebrates, for example, in veterinary medicine and in animal tests in which human diseases are examined on an animal model, for example, EAE (experimental autoimmune encephalomyelitis) in mice (Mus musculus), which is an animal model of the human disease multiple sclerosis. Non-human species of vertebrates are, for example, and more specifically mice (Mus musculus), rats (Rattus norvegicus), cows (Bos taurus), horses (Equus equus) and green monkeys (Macaca mulatta). MHC proteins of mice are, for example, referred to as H-2-proteins, wherein the MHC class I proteins are encoded by the gene loci H2K, H2L and H2D and the MHC class II proteins are encoded by the gene loci H21.

[0154] A “peptide free MHC polypeptide” or “peptide free MHC multimer” as used herein refers to an MHC monomer or MHC multimer which does not contain a peptide in binding groove of the MHC polypeptide. Peptide free MHC monomers and multimers are also referred to as “empty”. In one embodiment, the peptide free MHC polypeptide or multimer is an MHC Class I polypeptide or multimer. In another embodiment, the peptide free MHC polypeptide or multimer is an MHC Class II polypeptide or multimer.

[0155] As used herein, the term “multimer” refers to a plurality of units. In some embodiments, the multimer comprises one or more different units. In some embodiments, the units in the multimer are the same. In some embodiments, the units in the multimer are different. In some embodiments, the multimer comprises a mixture of units that are the same and different.

[0156] The terms “peptide epitope”, “MHC peptide epitope”, “MHC peptide antigen” and “MHC ligand” are used interchangeably herein and refer to an MHC ligand that can bind in the peptide binding groove of an MHC molecule. The peptide epitope can typically be presented by the MHC molecule. A peptide epitope typically has between 8 and 24 amino acids that are linked via peptide bonds. The peptide can contain one or more modifications such as, but not limited to, the side chains of the amino acid residues, the presence of a label or tag, the presence of a synthetic amino acid, a functional equivalent of an amino acid, or the like. Typical modifications include those as produced by the cellular machinery, such as glycan addition and phosphorylation. However, other types of modification are also within the scope of the disclosure.

[0157] As used herein, the terms “peptide exchange” refers to a competition assay wherein a placeholder peptide is removed and replaced by a “exchanged peptide” (or “exchange peptide epitope”) also referred to herein as a “rescue peptide” (or “rescue peptide epitope”) or “competitor peptide” (or “competitor peptide epitope). Typically, peptide exchange occurs under conditions in which the placeholder peptide is released by cleavage of the peptide or under suitable conditions allowing rescue peptides to compete for binding to the binding pocket of an MHC monomer or multimer. For example, peptide exchange can be accomplished by UV-induced exchange, dipeptide-induced exchange, temperature-induced exchange, or other exchange methods known in the art, and disclosed herein. Exemplary methods of peptide exchange are set forth in FIG. 2.

[0158] As used herein, the term “peptide library” refers to a plurality of peptides. In some embodiments, the library comprises one or more peptides with unique sequences. In some embodiments, each peptide in the library has a different sequence. In some embodiments, the library comprises a mixture of peptides with the same and different sequences.

[0159] As used herein, the term “high diversity peptide library” refers to a peptide library with a high degree of peptide variety. For example, a high diversity peptide library comprises about 10³, about 10⁴, about 10⁵, about 10⁶, about 10⁷, about 10⁸, about 10⁹, about 10¹⁰, about 10¹¹, about 10¹², about 10¹³, about 10¹⁴, about 10¹⁵, about 10¹⁶, about 10¹⁷, about 10¹⁸, about 10¹⁹, about 10²⁰, or more different peptides.

[0160] As used herein, the term “library peptide” refers to a single peptide in the library.

[0161] As used herein, the terms “placeholder peptide” or “exchangeable peptide” are used interchangeably to refer to a peptide or peptide-like compound that binds with sufficient affinity to an MHC protein (e.g., MHCI or MHCII protein) and which causes or promotes proper folding of the MHC protein from the unfolded state or stabilization of the folded MHC protein. The placeholder peptide can subsequently be exchanged with a different peptide of interest (referred to as an exchange peptide or rescue peptide). This exchange can be accomplished by UV-induced exchange, dipeptide-induced exchange, temperature-induced exchange, or other exchange methods known in the art.

[0162] The terms “peptide,” polypeptide,” and “protein” are used interchangeably herein to refer to a polymer of amino acid residues. The terms apply to amino acid polymers in which one or more amino acid residue is an artificial chemical mimetic of a corresponding naturally occurring amino acid, as well as to naturally occurring amino acid polymers and non-naturally occurring amino acid polymer. Peptides, polypeptides and proteins contain a series of amino acid residues, connected one to the other typically by peptide bonds between the alpha-amino and carbonyl groups of the adjacent amino acids, or a salt thereof. The terms “isolated peptide,” “isolated protein” and “isolated polypeptide” are used interchangeably to refer to a protein (e.g., a soluble, multimeric protein) which has been separated or purified from other components (e.g., proteins, cellular material) and/or chemicals. Typically, a polypeptide is purified when it constitutes at least 60 (e.g., at least 65, 70, 75, 80, 85, 90, 92, 95, 97, or 99) % by weight of the total protein in the sample.

[0163] As used herein, the term “protein folding” refers to spatial organization of a peptide. In some embodiments, the amino acid sequence influences the spatial organization or folding of the peptide. In some embodiments, a peptide may be folded in a functional conformation. In some embodiments, a folded peptide has one or more biological functions. In some embodiments, a folded peptide acquires a three-dimensional structure.

[0164] As used herein, the term “N-terminus amino acid residue” refers to one or more amino acids at the N-terminus of a polypeptide.

[0165] As used herein, the terms “small ubiquitin-like modifier moiety” or “SUMO domain” or “SUMO moiety” are used interchangeably and refer to a specific protease recognition moiety.

[0166] As used herein, the term “tag” refers to an oligonucleotide component, generally DNA, that provides a means of addressing a target molecule (e.g., a Conjugated Multimer) to which it is joined. For example, in some embodiments, a tag comprises a nucleotide sequence that permits identification, recognition, and/or molecular or biochemical manipulation of the molecule to which the tag is attached (e.g., by providing a unique sequence, and/or a site for annealing an oligonucleotide, such as a primer for extension by a DNA polymerase, or an oligonucleotide for capture or for a ligation reaction). The process of joining the tag to the target molecule is sometimes referred to herein as “tagging” and a target molecule that undergoes tagging or that contains a tag is referred to as “tagged” (e.g., a “tagged Conjugated Multimer”).” A tag can be a barcode, an adapter sequence, a primer hybridization site, or a combination thereof.

[0167] The term “T cell” refers to a type of white blood cell that can be distinguised from other white blood cells by the presence of a T cell receptor on the cell surface. There are several subsets of T cells, including, but not limited to, T helper cells (a.k.a. TH cells or CD4+ T cells) and subtypes, including T_{H}1, T_{H}2, T_{H}3, T_{H}17, T_{H}9, and T_{FH} cells, cytotoxic T cells (a.k.a Tc cells, CD8+ T cells, cytotoxic T lymphocytes, T-killer cells, killer T cells), memory T cells and subtypes, including central memory T cells (T_{CM} cells), effector memory T cells (T_{EM} and T_{EMRA} cells), and resident memory T cells (T_{RM} cells), regulatory T cells (a.k.a. T_{reg} cells or suppressor T cells) and subtypes, including CD4⁺ FOXP3⁺ T_{reg} cells, CD4⁺FOXP3⁻ T_{reg} cells, Tr1 cells, Th3 cells, and T_{reg}17 cells, natural killer T cells (a.k.a. NK T cells), mucosal associated invariant T cells (MAITs), and gamma delta T cells (γδ T cells), including Vγ9/Vδ2 T cells. The term “T cell cytotoxicity” includes any immune response that is mediated by CD8+ T cell activation.

[0168] As used herein, the phrase “T cell receptor” and the term “TCR” refer to a surface protein of a T cell that allows the T cell to recognize an antigen and/or an epitope thereof, typically bound to one or more major histocompatibility complex (MHC) molecules. A TCR functions to recognize an antigenic determinant and to initiate an immune response. Typically, TCRs are heterodimers comprising two different protein chains. In the vast majority of T cells, the TCR comprises an alpha (a) chain and a beta (β) chain. Each chain comprises two extracellular domains: a variable (V) region and a constant (C) region, the latter of which is membrane-proximal. The variable domains of α-chains and of β-chains consist of three hypervariable regions that are also referred to as the complementarity determining regions (CDRs). The CDRs, in particular CDR3, are primarily responsible for contacting antigens and thus define the specificity of the TCR, although CDR1 of the α-chain can interact with the N-terminal part of the antigen, and CDR1 of the β-chain interacts with the C-terminal part of the antigen. Approximately 5% of T cells have TCRs made up of gamma and delta (γ/δ) chains. All numbering of the amino acid sequences and designation of protein loops and sheets of the TCRs is according to the IMGT numbering scheme (IMGT, the international ImMunoGeneTics information system@imgt.cines.fr; http://imgt.cines.fr; Lefranc et al., (2003) Dev Comp Immunol 27:55 77; Lefranc et al. (2005) Dev Comp Immunol 29:185-203).

[0169] As used herein, the term “engineered TCR” is understood to mean a modified TCR, e.g., a recombinantly modified TCR. For example, the TCR may contain a modified binding cassette (e.g., where one or more CDR sequences or other elements is modified, for example, by introducing corresponding sequences from a different TCR). For example, the alpha and/or beta chain CDR3 sequence of a first TCR identified herein may be introduced into a second, different TCR present in or derived from a given T cell. The TCR may also contain modification, truncation, or deletion of its constant region, transmembrane region, and/or intracellular region. For example, at least the transmembrane region and the intracellular region can be deleted to generate a soluble form of a TCR.

[0170] As used herein, the terms “soluble T cell receptor” refers to heterodimeric truncated variants of TCRs, which comprise extracellular portions of the TCR α-chain and β-chain (e.g., linked by a disulfide bond), but which lack the transmembrane and cytosolic domains of the full-length protein. The sequence (amino acid or nucleic acid) of the soluble TCR α-chain and β-chains may be identical to the corresponding sequences in a native TCR or may comprise variant soluble TCR α-chain and β-chain sequences, as compared to the corresponding native TCR sequences. The term “soluble T cell receptor” as used herein encompasses soluble TCRs with variant or non-variant soluble TCR α-chain and β-chain sequences. The variations may be in the variable or constant regions of the soluble TCR α-chain and β-chain sequences and can include, but are not limited to, amino acid deletion, insertion, substitution mutations as well as changes to the nucleic acid sequence, which do not alter the amino acid sequence. Variants retain the binding functionality of their parent molecules.

[0171] As used herein, the terms “subject” and “patient” are used interchangeably and include human and non-human animals. Non-human animals include all vertebrates, e.g., mammals and non-mammals, such as non-human primates, sheep, dog, cow, chickens, amphibians, and reptiles.

[0172] As used herein, a “TCR/pMHC complex” refers to a protein complex formed by binding between T cell receptor (TCR), or soluble portion thereof, and a peptide-loaded MHC molecule. Accordingly, a “component of a TCR/pMHC complex” refers to one or more subunits of a TCR (e.g., Vα, Vβ, Cα, Cβ), or to one or more subunits of an MHC or pMHC class I or II molecule.

[0173] As used herein, the term “treating” includes any effect, e.g., lessening, reducing, modulating, ameliorating or eliminating, that results in the improvement of the condition, disease, disorder, and the like, or ameliorating a symptom thereof.

[0174] As used herein, the term “unbiased” refers to lacking one or more selective criteria.

### II. Overview

[0175] Several companies are currently providing vaccines designed to induce humoral responses against the spike protein of SARS-CoV-2. However, for long lasting protection, it is contemplated that the generation of T cell memory will be required (Peng et al. (2020) Nature Immunol. doi: 10.1038/s41590-020-782-6), even if pre-existing T cell immunity to common cold coronavirus might play a role (Nelde et al. (2020) Nature Immunol. doi: 10.1038/s41590-020-00808-x; Grifoni et al. (2020) Cell 181, 1489-1501.e15). Protection by T cells, unlike the humoral response, relies entirely on T cell receptor recognition of pathogen-derived peptides presented by MHC and is mostly independent of physiological function or localization of the target protein. Consequently, while only particular epitopes of surface proteins allow targeting by neutralizing antibodies, many peptides can serve as T cell targets (T cell epitopes), providing a much broader coverage of the SARS-CoV-2 proteome space for therapeutic development.

[0176] Notwithstanding the foregoing, the prediction of antigen presentation by MHC molecules to T cells has been challenging given the diversity in both MHC and peptide space across which sophisticated analytical methods are traditionally required to generate sufficient data to train computational models. Furthermore, the breadth and nature of the cellular immune response to SARS-CoV-2 infection is driven by diversity in both T cell receptor repertoire and human leukocyte antigen (HLA) genetics. For example, mammalian cells express up to six different HLA class I alleles that shape antigen presentation in disease, and allelic diversity has been associated with both disease susceptibility and outcome of viral infections (MacDonald et al. 2000) J. Infect Dis. 181, 1581-1589; Ochoa et al. (2020) Vivol. J. 17, 128).

[0177] The work described herein leverages two different approaches that interrogate the interactions between specific peptide antigens associated with SARS-CoV-2 that are presented by specific MHC molecules encoded by certain HLA genes to specific T cell receptors expressed on certain T cells. In a first approach described in detail in Example 20, the capacity of certain HLA alleles to present SARS-CoV-2 virus peptides was interrogated using a mammalian epitope display known as MEDi. The findings were validated by studying T cell recognition of the SARS-CoV-2 virus in acute COVID-19 patients and by analyzing the impact of mutations carried by novel SARS-CoV-2 strains. Among other things, the studies suggest that immune evasion is based on shifting peptide presentation away from well recognized CD4 epitopes. Given the importance of CD4 T cells in controlling B cell and CD8 T cell responses in COVID-19 patients, the results described herein guide the generation of vaccines or therapeutics designed to elicit efficient and long lasting cellular immunity. In a second approach described in detail in Example 21, the connections between T cell specificity, HLA variation, conserved features of paired a/0 TCR repertoires, and cellular phenotype observed in CD8+ T cell responses to SARS-CoV-2 infection were elucidated at single-cell resolution using a single-cell, multi-omic technology. In this study, over a 100 million CD8+ T cells were profiled ex vivo across 76 acute, convalescent, or unexposed individuals, which identified T cell specificity for over 600 epitopes presented by four HLA alleles across the SARSCoV-2 proteome. The data suggest a strong association between HLA genotype and the CD8+ T cell response to SARS-CoV-2, which can also guide the generation of vaccines designed to confer long-term immunity to protect against SARS-CoV-2 variants and related viral pathogens.

[0178] As a result of the foregoing, provided herein are specific, identified SARS-CoV-2 T cell epitopes that are presented or are presentable to the immune system. In particular, the specific SARS-CoV-2 T cell epitopes disclosed herein represent T cell epitopes of SARS-CoV-2 proteins that can be presented via certain MHC class I and MHC class II molecules on antigen presenting cells to certain T cells, e.g., CD8+ and CD4+ T cells, via the T cell receptors expressed on such T cells.

### III. T Cell Epitopes and Antigen Presentation

[0179] Provided herein are specific, identified SARS-CoV-2 T cell epitopes that are presented or are presentable to the immune system. In particular, the specific SARS-CoV-2 T cell epitopes disclosed herein represent T cell epitopes of SARS-CoV-2 proteins that can be presented via certain MHC class I and MHC class II molecules on antigen presenting cells to certain T cells, e.g., CD8+ and CD4+ T cells, via the T cell receptors expressed on such T cells. The following sections discuss the T cell epitopes, the MHC molecules that present the T cell epitopes and the T cell receptors that bind the T cell epitopes, and their use in various applications.

[0180] In certain embodiments, a SARS-CoV-2 T cell epitope comprises an amino acid sequence selected from the amino acid sequences set forth in TABLES 1-4.

[0181] In certain embodiments, the T cell epitope is 8-10, 8-11, 8-12, 8-13, 8-14, 8-15, 8-16, 8-17, 8-18, 8-19, 8-20, 8-21, 8-22, 8-23, 8-24, 8-25, 8-30, or 8-35 amino acids in length. In certain embodiments, the T cell epitope is an MHC Class I-restricted epitope and is 8-10 amino acids in length. In certain embodiments, the T cell epitope is an MHC Class II-restricted epitope and is 13-14, 13-15, 13-16, 13-17, 13-18, 13-19, 13-20, 13-21, 13-22, 13-23, 13-24, 13-25, 13-30, or 13-35 amino acids in length.

[0182] Exemplary CD8+ T cell epitopes including their corresponding MHC class I alleles on antigen presenting cells, and the corresponding T cell receptors on CD8+ T cells or are set forth in TABLE 1.

TABLE 1

| | | | Epitope SEQ ID | |
|---|---|---|---|---|
| TCR ID¹ | HLA class I | SARS-CoV-2 epitope | NO: | No. of Cells |
| TCR_1 | A*02:01 | TLMNVITLV | 366 | 114 |
| TCR_2 | A*02:01 | LLLDRLNQL | 340 | 89 |
| TCR_3 | A*24:02 | TSQWLTNIF | 331 | 55 |
| TCR_4 | B*07:02 | SPRWYFYYL | 323 | 47 |
| TCR_5 | A*02:01 | YLQPRTFLL | 288 | 36 |
| TCR_6 | A*02:01 | MLDMYSVML | 314 | 22 |
| TCR_7 | A*02:01 | YLQPRTFLL | 288 | 14 |
| TCR_8 | A*24:02 | YYTSNPTTF | 319 | 13 |
| TCR_9 | A*24:02 | NYMPYFFTL | 316 | 12 |
| TCR_10 | B*07:02 | SPRWYFYYL | 323 | 11 |
| TCR_11 | B*07:02 | QPGQTFSVL | 326 | 10 |
| TCR_12 | A*02:01 | LLLDRLNQL | 340 | 10 |
| TCR_13 | A*24:02 | VYIGDPAQL | 317 | 9 |
| TCR_14 | A*02:01 | YLQPRTFLL | 288 | 9 |
| TCR_15 | A*02:01 | KLNEEIAII | 315 | 9 |
| TCR_16 | A*02:01 | YLQPRTFLL | 288 | 8 |
| TCR_17 | B*07:02 | SPRWYFYYL | 323 | 7 |
| TCR_18 | B*07:02 | SPRWYFYYL | 323 | 7 |
| TCR_19 | A*24:02 | VYAWNRKRI | 322 | 7 |
| TCR_20 | A*02:01 | YLQPRTFLL | 288 | 7 |
| TCR_21 | B*07:02 | SPRWYFYYL | 323 | 6 |
| TCR_22 | A*02:01 | LLYDANYFL | 286 | 6 |
| TCR_23 | A*24:02 | VYIGDPAQL | 317 | 6 |
| TCR_24 | A*24:02 | VMHANYIFW | 349 | 5 |
| TCR_25 | A*01:01 | FTSDYYQLY | 328 | 5 |
| TCR_26 | A*01:01 | PTDNYITTY | 327 | 5 |
| TCR_27 | A*02:01 | LLYDANYFL | 286 | 5 |
| TCR_28 | A*02:01 | YLQPRTFLL | 288 | 5 |
| TCR_29 | B*07:02 | SPRWYFYYL | 323 | 4 |
| TCR_30 | B*07:02 | SPRWYFYYL | 323 | 4 |
| TCR_31 | A*24:02 | QYIKWPWYI | 318 | 4 |
| TCR_32 | A*02:01 | MLDMYSVML | 314 | 4 |
| TCR_33 | A*02:01 | YLQPRTFLL | 288 | 4 |
| TCR_34 | A*02:01 | KLWAQCVQL | 287 | 4 |
| TCR_35 | A*02:01 | KLWAQCVQL | 287 | 4 |
| TCR_36 | B*07:02 | SPRWYFYYL | 323 | 4 |
| TCR_37 | A*02:01 | TQWSLFFFL | 408 | 3 |
| TCR_38 | B*07:02 | SPRWYFYYL | 323 | 3 |
| TCR_39 | A*02:01 | FLLNKEMYL | 289 | 3 |
| TCR_40 | A*24:02 | VYIGDPAQL | 317 | 3 |
| TCR_41 | A*01:01 | FTSDYYQLY | 328 | 3 |
| TCR_42 | B*07:02 | SPRWYFYYL | 323 | 3 |
| TCR_43 | A*02:01 | YLQPRTFLL | 288 | 3 |
| TCR_44 | A*24:02 | NYMPYFFTL | 316 | 3 |
| TCR_45 | B*07:02 | SPRWYFYYL | 323 | 3 |
| TCR_46 | A*02:01 | ALWEIQQVV | 297 | 3 |
| TCR_47 | A*02:01 | LLYDANYFL | 286 | 3 |
| TCR_48 | A*24:02 | TSQWLTNIF | 331 | 3 |
| TCR_49 | A*24:02 | NYMPYFFTL | 316 | 3 |
| TCR_50 | A*02:01 | KLWAQCVQL | 287 | 3 |
| TCR_51 | A*02:01 | KLWAQCVQL | 287 | 3 |
| TCR_52 | A*02:01 | ALWEIQQVV | 297 | 3 |
| TCR_53 | A*01:01 | PTDNYITTY | 327 | 3 |
| TCR_54 | A*01:01 | PTDNYITTY | 327 | 3 |
| TCR_55 | A*02:01 | ALWEIQQVV | 297 | 2 |
| TCR_56 | A*24:02 | STQWSLFFF | 342 | 2 |
| TCR_57 | A*02:01 | ALWEIQQVV | 297 | 2 |
| TCR_58 | A*02:01 | ILFTRFFYV | 393 | 2 |
| TCR_59 | A*02:01 | KLWAQCVQL | 287 | 2 |
| TCR_60 | A*02:01 | KSVNITFEL | 338 | 2 |
| TCR_61 | A*24:02 | TSAMQTMLF | 355 | 2 |
| TCR_62 | A*02:01 | ALWEIQQVV | 297 | 2 |
| TCR_63 | A*02:01 | YLQPRTFLL | 288 | 2 |
| TCR_64 | A*02:01 | ALWEIQQVV | 297 | 2 |
| TCR_65 | A*02:01 | LLYDANYFL | 286 | 2 |
| TCR_66 | A*24:02 | LFTRFFYVL | 357 | 2 |
| TCR_67 | A*02:01 | GLMWLSYFV | 293 | 2 |
| TCR_68 | A*24:02 | FYWFFSNYL | 352 | 2 |
| TCR_69 | A*02:01 | LLYDANYFL | 286 | 2 |
| TCR_70 | A*02:01 | YLQPRTFLL | 288 | 2 |
| TCR_71 | A*02:01 | LLLDRLNQL | 340 | 2 |
| TCR_72 | A*02:01 | LLLDRLNQL | 340 | 2 |
| TCR_73 | A*24:02 | CLAYYFMRF | 334 | 2 |
| TCR_74 | A*02:01 | GLMWLSYFI | 294 | 2 |
| TCR_75 | A*02:01 | KLWAQCVQL | 287 | 2 |
| TCR_76 | A*24:02 | LWLLWPVTL | 337 | 2 |
| TCR_77 | A*02:01 | KLWAQCVQL | 287 | 2 |
| TCR_78 | A*02:01 | ALWEIQQVV | 297 | 2 |
| TCR_79 | A*02:01 | VMVELVAEL | 350 | 2 |
| TCR_80 | A*24:02 | NYMPYFFTL | 316 | 2 |
| TCR_81 | A*02:01 | YLQPRTFLL | 288 | 2 |
| TCR_82 | B*07:02 | SPRWYFYYL | 323 | 2 |
| TCR_83 | A*24:02 | NYMPYFFTL | 316 | 2 |
| TCR_84 | A*02:01 | LLYDANYFL | 286 | 2 |
| TCR_85 | A*02:01 | KSVNITFEL | 338 | 2 |
| TCR_86 | A*02:01 | YLQPRTFLL | 288 | 2 |
| TCR_87 | A*02:01 | YLGGMSYYC | 381 | 2 |
| TCR_88 | A*02:01 | YLQPRTFLL | 288 | 2 |
| TCR_89 | B*07:02 | SPRWYFYYL | 323 | 2 |
| TCR_90 | A*02:01 | YLQPRTFLL | 288 | 2 |
| TCR_91 | B*07:02 | SPRWYFYYL | 323 | 2 |
| TCR_92 | B*07:02 | SPRWYFYYL | 323 | 2 |
| TCR_93 | A*02:01 | RQLLFVVEV | 360 | 2 |
| TCR_94 | A*02:01 | YLQPRTFLL | 288 | 2 |
| TCR_95 | A*02:01 | VFLVLLPLV | 362 | 2 |
| TCR_96 | A*02:01 | VMVELVAEL | 350 | 2 |
| TCR_97 | B*07:02 | RIRGGDGKM | 324 | 2 |
| TCR_98 | A*02:01 | YLQPRTFLL | 288 | 2 |
| TCR_99 | A*02:01 | YLQPRTFLL | 288 | 2 |
| TCR_100 | A*24:02 | QYIKWPWYI | 318 | 2 |
| TCR_101 | A*24:02 | LWLLWPVTL | 337 | 2 |
| TCR_102 | A*02:01 | YLQPRTFLL | 288 | 2 |
| TCR_103 | A*02:01 | YLQPRTFLL | 288 | 2 |
| TCR_104 | A*02:01 | LACFVLAAV | 363 | 2 |
| TCR_105 | A*24:02 | QYIKWPWYI | 318 | 2 |
| TCR_106 | A*02:01 | YLQPRTFLL | 288 | 2 |
| TCR_107 | B*07:02 | RIRGGDGKM | 324 | 2 |
| TCR_108 | A*02:01 | YLQPRTFLL | 288 | 2 |
| TCR_109 | A*24:02 | LWLLWPVTL | 337 | 2 |
| TCR_110 | A*02:01 | ALWEIQQVV | 297 | 5 |
| TCR_111 | A*24:02 | QYIKWPWYI | 318 | 4 |
| TCR_112 | B*07:02 | QPGQTFSVL | 326 | 4 |
| TCR_113 | A*02:01 | YLQPRTFLL | 288 | 4 |
| TCR_114 | A*24:02 | YYQLYSTQL | 321 | 3 |
| TCR_115 | B*07:02 | SPRWYFYYL | 323 | 3 |
| TCR_116 | A*02:01 | KLWAQCVQL | 287 | 2 |
| TCR_117 | A*02:01 | LLLDRLNQL | 340 | 2 |
| TCR_118 | B*07:02 | SPRWYFYYL | 323 | 2 |
| TCR_119 | A*02:01 | YLYALVYFL | 354 | 2 |
| TCR_120 | A*02:01 | ALWEIQQVV | 297 | 5 |
| TCR_121 | A*24:02 | QYIKWPWYI | 318 | 4 |
| TCR_122 | B*07:02 | QPGQTFSVL | 326 | 4 |
| TCR_123 | A*02:01 | YLQPRTFLL | 288 | 4 |
| TCR_124 | A*24:02 | YYQLYSTQL | 321 | 3 |
| TCR_125 | B*07:02 | SPRWYFYYL | 323 | 3 |
| TCR_126 | A*02:01 | KLWAQCVQL | 287 | 2 |
| TCR_127 | A*02:01 | LLLDRLNQL | 340 | 2 |
| TCR_128 | B*07:02 | SPRWYFYYL | 323 | 2 |
| TCR_129 | A*02:01 | YLYALVYFL | 354 | 2 |
| TCR_130 | A*32:01 | RLFARTRSMW | 679 | N/A² |
| TCR_131 | B*07:02 | QSAPHGVVFL | 680 | N/A² |
| TCR_132 | B*48:01 | RKHFSMMILS | 681 | N/A² |

¹Denotes exemplary T cell receptors set forth in TABLES 5 and 6.
²Denotes epitopes that were identified in Example 21 (MEDi)

[0183] Exemplary immunodominant CD8+ T cell epitopes including their corresponding MHC class I alleles on antigen presenting cells, and the corresponding T cell receptors on CD8+ T cells are set forth in TABLE 2.

TABLE 2

| SARS- | | | | No. of | | | | |
|---|---|---|---|---|---|---|---|---|
| CoV-2 | Epitope | | Total | Clono | No. of | | COVID | Immuno |
| Epitope | SEQ ID | HLA | Cells | Types | subjects | TCR IDs | ONLY^{$} | dominant |
| CDR3alpha | | | | | | | | |
| FTSDYY | 328 | A*01:01 | 5 | 1 | 2 | TCR_25 | | YES |
| QLY | | | | | | | | |
| LLYDAN | 286 | A*02:01 | 30 | 20 | 9 | TCR_22, | YES | YES |
| YFL | | | | | | TCR_27, | | |
| | | | | | | TCR_65, | | |
| | | | | | | TCR_107 | | |
| PTDNYIT | 327 | A*01:01 | 13 | 9 | 2 | TCR_53, | YES | YES |
| TY | | | | | | TCR_54 | | |
| QPGQTF | 326 | B*07:02 | 10 | 1 | 2 | TCR_11, | | YES |
| SVL | | | | | | TCR_122 | | |
| RIRGGD | 324 No: | B*07:02 | 3 | 2 | 2 | TCR_22, | YES | YES |
| GKM | | | | | | TCR_27, | | |
| | | | | | | TCR_65, | | |
| | | | | | | TCR_107 | | |
| YLQPRT | 288 | A*02:01 | 24 | 18 | 8 | TCR_43, | YES | YES |
| FLL | | | | | | TCR_88, | | |
| | | | | | | TCR_94, | | |
| | | | | | | TCR_103, | | |
| | | | | | | TCR_108 | | |
| YLQPRT | 288 | A*02:01 | 38 | 3 | 4 | TCR_5, | YES | YES |
| FLL | | | | | | TCR_63, | | |
| | | | | | | TCR_106 | | |
| YLQPRT | 288 | A*02:01 | 6 | 4 | 4 | TCR_45, | YES | YES |
| FLL | | | | | | TCR_63, | | |
| | | | | | | TCR_106 | | |
| YLQPRT | 288 | A*02:01 | 5 | 5 | 4 | TCR_14, | YES | YES |
| FLL | | | | | | TCR_33 | | |
| YLQPRT | 288 | A*02:01 | 3 | 3 | 3 | TCR_43, | YES | YES |
| FLL | | | | | | TCR_88, | | |
| | | | | | | TCR_94, | | |
| | | | | | | TCR_103 | | |
| | | | | | | TCR_108 | | |
| YLQPRT | 288 | A*02:01 | 13 | 2 | 2 | TCR_16, | YES | YES |
| FLL | | | | | | TCR_28 | | |
| CDR3beta | | | | | | | | |
| FTSDYY | 328 | A*01:01 | 10 | 2 | 2 | TCR_25 | YES | |
| QLY | | | | | | | | |
| LLYDAN | 286 | A*02:01 | 9 | 8 | 5 | TCR_22, | YES | YES |
| YFL | | | | | | TCR_27, | | |
| | | | | | | TCR_65, | | |
| | | | | | | TCR_77 | | |
| LLYDAN | 286 | A*02:01 | 7 | 3 | 3 | TCR_27 | YES | YES |
| YFL | | | | | | | | |
| LLYDAN | 286 | A*02:01 | 10 | 5 | 3 | TCR_22, | YES | YES |
| YFL | | | | | | TCR_27, | | |
| | | | | | | TCR_77 | | |
| PTDNYIT | 327 | A*01:01 | 10 | 7 | 2 | TCR_54 | YES | YES |
| TY | | | | | | | | |
| QPGQTF | 326 | B*07:02 | 26 | 5 | 3 | TCR_11, | | YES |
| SVL | | | | | | TCR_112 | | |
| | | | | | | TCR_122 | | |
| RIRGGD | 324 | B*07:02 | 3 | 2 | 2 | TCR_16, | YES | YES |
| GKM | | | | | | TCR_107 | | |
| YLQPRT | 288 | A*02:01 | 15 | 13 | 8 | TCR_63, | YES | YES |
| FLL | | | | | | TCR_106 | | |
| YLQPRT | 288 | A*02:01 | 14 | 10 | 6 | TCR_20, | YES | YES |
| FLL | | | | | | TCR_43, | | |
| | | | | | | TCR_98, | | |
| | | | | | | TCR_103 | | |
| YLQPRT | 288 | A*02:01 | 9 | 7 | 5 | TCR_81, | YES | YES |
| FLL | | | | | | TCR_86 | | |
| YLQPRT | 288 | A*02:01 | 17 | 5 | 4 | TCR_14, | YES | YES |
| FLL | | | | | | TCR_33, | | |
| | | | | | | TCR_70 | | |
| YLQPRT | 288 | A*02:01 | 42 | 3 | 3 | TCR_5, | YES | YES |
| FLL | | | | | | TCR_63, | | |
| | | | | | | TCR_106 | | |
| YLQPRT | 288 | A*02:01 | 6 | 4 | 3 | TCR_90, | YES | YES |
| FLL | | | | | | TCR_98 | | |
| YLQPRT | 288 | A*02:01 | 5 | 4 | 3 | TCR_43, | YES | YES |
| FLL | | | | | | TCR_88, | | |
| | | | | | | TCR_103, | | |
| | | | | | | TCR_108 | | |
| YLQPRT | 288 | A*02:01 | 8 | 4 | 3 | TCR_28 | YES | YES |
| FLL | | | | | | | | |

^{$}Covid Only-specific epitopes not present in patients infected with SARS-Cov-2 as described in Example 22 below.

[0184] Exemplary CD4+ T cell epitopes including their corresponding MHC class II alleles on antigen presenting cells, and the corresponding T cell receptors on CD4+ T cells are set forth in TABLE 3.

TABLE 3

| | | | Epitope |
|---|---|---|---|
| | HLA Class | | SEQ ID |
| TCR ID | II | SARS-CoV-2 Epitope | NO: |
| TCR_133 | DPA1*02:02 | NAQALNTLVKQLSSNFG | 688 |
| | DPB1*05:01 | | |
| TCR_134 | DRB1*07:01 | IPTNFTISVTTEILP | 689 |
| TCR_135 | DRB1*07:01 | SGTWLTYTGAIKLDDKDPNFK | 690 |
| TCR_136 | DRB1*07:01 | ASFSTFKCYGVSPTK | 691 |
| | | LNDLCFT | |
| TCR_137 | DRB1*07:01 | LSYYKLGASQRVAGD | 692 |
| TCR_138 | DRB1*14:05 | LLLLDRLNQLESKMSG | 693 |
| | | KGQQQQ | |
| TCR_139 | DRB1*11:01 | RGHLRIAGEHLGRCDIKDLP | 694 |
| TCR_140 | DRB1*08:03 | DQVILLNKHIDAY | 695 |

[0185] Exemplary CD4+ T cell epitopes including their corresponding MHC class II alleles on antigen presenting cells are set forth in TABLE 4.

TABLE 4

| HLA Class II | SARS-CoV-2 Protein | 15aa Peptide | SEQ ID NO: |
|---|---|---|---|
| DRB10701 | spike glycoprotein - | YTNSFTRGVYYPDKV | 696 |
| DRB10701 | spike glycoprotein - | VFRSSVLHSTQDLFL | 697 |
| DRB10701 | spike glycoprotein - | DSKTQSLLIVNNATN | 698 |
| DRB10701 | spike glycoprotein - | KIYSKHTPINLVRDL | 699 |
| DRB10701 | spike glycoprotein - | NFRVQPTESIVRFPN | 700 |
| DRB10701 | spike glycoprotein - | NVYADSFVIRGDEVR | 701 |
| DRB10701 | spike glycoprotein - | SPRRARSVASQSIIA | 702 |
| DRB10701 | spike glycoprotein - | VASQSIIAYTMSLGA | 703 |
| DRB10701 | spike glycoprotein - | SIIAYTMSLGAENSV | 704 |
| DRB10701 | spike glycoprotein - | YTMSLGAENSVAYSN | 705 |
| DRB10701 | spike glycoprotein - | SVAYSNNSIAIPTNF | 706 |
| DRB10701 | spike glycoprotein - | QYTSALLAGTITSGW | 707 |
| DRB10701 | spike glycoprotein - | IRASANLAATKMSEC | 708 |
| DRB10701 | ORF8 - | YIRVGARKSAPLIEL | 709 |
| DRB10701 | ORF7a - | KHVYQLRARSVSPKL | 710 |
| DRB10701 | ORF3a - | PSDFVRATATIPIQA | 711 |
| DRB10701 | ORF3a - | KKRWQLALSKGVHFV | 712 |
| DRB10701 | ORF3a - | GVVNPVMEPIYDEPT | 713 |
| DRB10701 | ORF1a polyprotein - | SYELQTPFEIKLAKK | 714 |
| DRB10701 | ORF1a polyprotein - | NFVFPLNSIIKTIQP | 715 |
| DRB10701 | ORF1a polyprotein - | GRIRSVYPVASPNEC | 716 |
| DRB10701 | ORF1a polyprotein - | ASFSASTSAFVETVK | 717 |
| DRB10701 | ORF1a polyprotein - | KKGAWNIGEQKSILS | 718 |
| DRB10701 | ORF1a polyprotein - | RVVRSIFSRTLETAQ | 719 |
| DRB10701 | ORF1a polyprotein - | RVLQKAAITILDGIS | 720 |
| DRB10701 | ORF1a polyprotein - | LRLIDAMMFTSDLAT | 721 |
| DRB10701 | ORF1a polyprotein - | KYCALAPNMMVTNNT | 722 |
| DRB10701 | ORF1a polyprotein - | LEFGATSAALQPEEE | 723 |
| DRB10701 | ORF1a polyprotein - | TVVVNAANVYLKHGG | 724 |
| DRB10701 | ORF1a polyprotein - | ALNKATNNAMQVESD | 725 |
| DRB10701 | ORF1a polyprotein - | YENFNQHEVLLAPLL | 726 |
| DRB10701 | ORF1a polyprotein - | NVYLAVFDKNLYDKL | 727 |
| DRB10701 | ORF1a polyprotein - | KPFITESKPSVEQRK | 728 |
| DRB10701 | ORF1a polyprotein - | TFLKKDAPYIVGDVV | 729 |
| DRB10701 | ORF1a polyprotein - | LRKVPTDNYITTYPG | 730 |
| DRB10701 | ORF1a polyprotein - | FYILPSIISNEKQEI | 731 |
| DRB10701 | ORF1a polyprotein - | IQRKYKGIKIQEGVV | 732 |
| DRB10701 | ORF1a polyprotein - | YTSKTTVASLINTLN | 733 |
| DRB10701 | ORF1a polyprotein - | EEAARYMRSLKVPAT | 734 |
| DRB10701 | ORF1a polyprotein - | KSVYYTSNPTTFHLD | 735 |
| DRB10701 | ORF1a polyprotein - | DVRETMSYLFQHANL | 736 |
| DRB10701 | ORF1a polyprotein - | KLLHKPIVWHVNNAT | 737 |
| DRB10701 | ORF1a polyprotein - | ILKPANNSLKITEEV | 738 |
| DRB10701 | ORF1a polyprotein - | NELSRVLGLKTLATH | 739 |
| DRB10701 | ORF1a polyprotein - | RIKASMPTTIAKNTV | 740 |
| DRB10701 | ORF1a polyprotein - | IINLVQMAPISAMVR | 741 |
| DRB10701 | ORF1a polyprotein - | VNTFSSTFNVPMEKL | 742 |
| DRB10701 | ORF1a polyprotein - | KLSHQSDIEVTGDSC | 743 |
| DRB10701 | ORF1a polyprotein - | HINAQVAKSHNIALI | 744 |
| DRB10701 | ORF1a polyprotein - | RQVVNVVTTKIALKG | 745 |
| DRB10701 | ORF1a polyprotein - | IAAVITREVGFVVPG | 746 |
| DRB10701 | ORF1a polyprotein - | VFSAVGNICYTPSKL | 747 |
| DRB10701 | ORF1a polyprotein - | ICYTPSKLIEYTDFA | 748 |
| DRB10701 | ORF1a polyprotein - | PLIQPIGALDISASI | 749 |
| DRB10701 | ORF1a polyprotein - | ALDISASIVAGGIVA | 750 |
| DRB10701 | ORF1a polyprotein - | FSNSGSDVLYQPPQT | 751 |
| DRB10701 | ORF1a polyprotein - | QTSITSAVLQSGFRK | 752 |
| DRB10701 | ORF1a polyprotein - | NFLVQAGNVQLRVIG | 753 |
| DRB10701 | ORF1a polyprotein - | KKLKKSLNVAKSEFD | 754 |
| DRB10701 | ORF1a polyprotein - | IIPLTTAAKLMVVIP | 755 |
| DRB10701 | ORF1a polyprotein - | LIVTALRANSAVKLQ | 756 |
| DRB10701 | ORF1b polyprotein - | MVPHISRQRLTKYTM | 757 |
| DRB10701 | ORF1b polyprotein - | DFIQTTPGSGVPVVD | 758 |
| DRB10701 | ORF1b polyprotein - | ILTLTRALTAESHVD | 759 |
| DRB10701 | ORF1b polyprotein - | FVVSTGYHFRELGVV | 760 |
| DRB10701 | ORF1b polyprotein - | TNNVAFQTVKPGNFN | 761 |
| DRB10701 | ORF1b polyprotein - | DFAVSKGFFKEGSSV | 762 |
| DRB10701 | ORF1b polyprotein - | QDALFAYTKRNVIPT | 763 |
| DRB10701 | ORF1b polyprotein - | NALLSTDGNKIADKY | 764 |
| DRB10701 | ORF1b polyprotein - | AYLRKHFSMMILSDD | 765 |
| DRB10701 | ORF1b polyprotein - | CFNSTYASQGLVASI | 766 |
| DRB10701 | ORF1b polyprotein - | ASIKNFKSVLYYQNN | 767 |
| DRB10701 | ORF1b polyprotein - | ERFVSLAIDAYPLTK | 768 |
| DRB10701 | ORF1b polyprotein - | DAYPLTKHPNQEYAD | 769 |
| DRB10701 | ORF1b polyprotein - | DHVISTSHKLVLSVN | 770 |
| DRB10701 | ORF1b polyprotein - | TFKLSYGIATVREVL | 771 |
| DRB10701 | ORF1b polyprotein - | TGYRVTKNSKVQIGE | 772 |
| DRB10701 | ORF1b polyprotein - | YFVLTSHTVMPLSAP | 773 |
| DRB10701 | ORF1b polyprotein - | YVRITGLYPTLNISD | 774 |
| DRB10701 | ORF1b polyprotein - | IVDTVSALVYDNKLK | 775 |
| DRB10701 | ORF1b polyprotein - | MFYKGVITHDVSSAI | 776 |
| DRB10701 | ORF1b polyprotein - | QHMVVKAALLADKFP | 777 |
| DRB10701 | ORF1b polyprotein - | KRNIKPVPEVKILNN | 778 |
| DRB10701 | ORF1b polyprotein - | VKILNNLGVDIAANT | 779 |
| DRB10701 | ORF1b polyprotein - | LFRNARNGVLITEGS | 780 |
| DRB10701 | ORF1b polyprotein - | LPETYFTQSRNLQEF | 781 |
| DRB10701 | ORF1b polyprotein - | YGDFSHSQLGGLHLL | 782 |
| DRB10701 | ORF1b polyprotein - | QYLNTLTLAVPYNMR | 783 |
| DRB10701 | ORF1b polyprotein - | RQWLPTGTLLVDSDL | 784 |
| DRB10701 | ORF1b polyprotein - | QKLALGGSVAIKITE | 785 |
| DRB10701 | ORF1b polyprotein - | HANYIFWRNTNPIQL | 786 |
| DRB10701 | ORF1b polyprotein - | KFPLKLRGTAVMSLK | 787 |
| DRB10701 | nucleocapsid | DLKFPRGQGVPINTN | 788 |
| | phosphoprotein - | | |
| DRB10701 | nucleocapsid | TATKAYNVTQAFGRR | 789 |
| | phosphoprotein - | | |
| DRB10701 | nucleocapsid | AQFAPSASAFFGMSR | 790 |
| | phosphoprotein - | | |
| DRB10701 | nucleocapsid | EVTPSGTWLTYTGAI | 791 |
| | phosphoprotein - | | |
| DRB10701 | nucleocapsid | WLTYTGAIKLDDKDP | 792 |
| | phosphoprotein - | | |
| DRB10701 | nucleocapsid | ETQALPQRQKKQQTV | 793 |
| | phosphoprotein - | | |
| DRB10701 | membrane glycoprotein | PKEITVATSRTLSYY | 794 |
| DRB10701 | envelope protein - | SRVKNLNSSRVPDLL | 795 |
| DRB10404 | spike glycoprotein - | VYFASTEKSNIIRGW | 796 |
| DRB10404 | spike glycoprotein - | NLVKNKCVNFNFNGL | 797 |
| DRB10404 | spike glycoprotein - | DLLFNKVTLADAGFI | 798 |
| DRB10404 | spike glycoprotein - | LGKLQDVVNQNAQAL | 799 |
| DRB10404 | spike glycoprotein - | QNAQALNTLVKQLSS | 800 |
| DRB10404 | spike glycoprotein - | IDRLITGRLQSLQTY | 801 |
| DRB10404 | spike glycoprotein - | RLQSLQTYVTQQLIR | 802 |
| DRB10404 | spike glycoprotein - | FPQSAPHGVVFLHVT | 803 |
| DRB10404 | ORF8 - | CLPFTINCQEPKLGS | 804 |
| DRB10404 | ORF7a - | LFIRQEEVQELYSPI | 805 |
| DRB10404 | ORF3a - | ALLAVFQSASKIITL | 806 |
| DRB10404 | ORF3a - | YYQLYSTQLSTDTGV | 807 |
| DRB10404 | ORF3a - | PVMEPIYDEPTTTTS | 808 |
| DRB10404 | ORF1a polyprotein - | TLGVLVPHVGEIPVA | 809 |
| DRB10404 | ORF1a polyprotein - | PLECIKDLLARAGKA | 810 |
| DRB10404 | ORF1a polyprotein - | VESCGNFKVTKGKAK | 811 |
| DRB10404 | ORF1a polyprotein - | KALNLGETFVTHSKG | 812 |
| DRB10404 | ORF1a polyprotein - | IVEEAKKVKPTVVVN | 813 |
| DRB10404 | ORF1a polyprotein - | APLLSAGIFGADPIH | 814 |
| DRB10404 | ORF1a polyprotein - | TAVVIPTKKAGGTTE | 815 |
| DRB10404 | ORF1a polyprotein - | CKSAFYILPSIISNE | 816 |
| DRB10404 | ORF1a polyprotein - | ETKAIVSTIQRKYKG | 817 |
| DRB10404 | ORF1a polyprotein - | TSKTTVASLINTLND | 818 |
| DRB10404 | ORF1a polyprotein - | HFIETISLAGSYKDW | 819 |
| DRB10404 | ORF1a polyprotein - | LGRYMSALNHTKKWK | 820 |
| DRB10404 | ORF1a polyprotein - | VQQESPFVMMSAPPA | 821 |
| DRB10404 | ORF1a polyprotein - | IKPVTYKLDGVVCTE | 822 |
| DRB10404 | ORF1a polyprotein - | VETSNSFDVLKSEDA | 823 |
| DRB10404 | ORF1a polyprotein - | PVSEEVVENPTIQKD | 824 |
| DRB10404 | ORF1a polyprotein - | DIILKPANNSLKITE | 825 |
| DRB10404 | ORF1a polyprotein - | NELSRVLGLKTLATH | 826 |
| DRB10404 | ORF1a polyprotein - | TFTRSTNSRIKASMP | 827 |
| DRB10404 | ORF1a polyprotein - | SLIYSTAALGVLMSN | 828 |
| DRB10404 | ORF1a polyprotein - | DLSLQFKRPINPTDQ | 829 |
| DRB10404 | ORF1a polyprotein - | HSLSHFVNLDNLRAN | 830 |
| DRB10404 | ORF1a polyprotein - | VKMFDAYVNTFSSTF | 831 |
| DRB10404 | ORF1a polyprotein - | KTLVATAEAELAKNV | 832 |
| DRB10404 | ORF1a polyprotein - | LIWNVKDFMSLSEQL | 833 |
| DRB10404 | ORF1a polyprotein - | QVVNVVTTKIALKGG | 834 |
| DRB10404 | ORF1a polyprotein - | LIQPIGALDISASIV | 835 |
| DRB10404 | ORF1a polyprotein - | YLKRRVVFNGVSFST | 836 |
| DRB10404 | ORF1a polyprotein - | AKALNDFSNSGSDVL | 837 |
| DRB10404 | ORF1a polyprotein - | CVLKLKVDTANPKTP | 838 |
| DRB10404 | ORF1a polyprotein - | KYKFVRIQPGQTFSV | 839 |
| DRB10404 | ORF1a polyprotein - | LEDEFTPFDVVRQCS | 840 |
| DRB10404 | ORF1a polyprotein - | ATVAYFNMVYMPASW | 841 |
| DRB10404 | ORF1a polyprotein - | GGKPCIKVATVQSKM | 842 |
| DRB10404 | ORF1a polyprotein - | FSSLPSYAAFATAQE | 843 |
| DRB10404 | ORF1a polyprotein - | PLNIIPLTTAAKLMV | 844 |
| DRB10404 | ORF1a polyprotein - | PDYNTYKNTCDGTTF | 845 |
| DRB10404 | ORF1a polyprotein - | AVKLQNNELSPVALR | 846 |
| DRB10404 | ORF1a polyprotein - | ALRQMSCAAGTTQTA | 847 |
| DRB10404 | ORF1a polyprotein - | ALAYYNTTKGGRFVL | 848 |
| DRB10404 | ORF1b polyprotein - | ETIYNLLKDCPAVAK | 849 |
| DRB10404 | ORF1b polyprotein - | ILRVYANLGERVRQA | 850 |
| DRB10404 | ORF1b polyprotein - | VDSYYSLLMPILTLT | 851 |
| DRB10404 | ORF1b polyprotein - | PILTLTRALTAESHV | 852 |
| DRB10404 | ORF1b polyprotein - | LGVVHNQDVNLHSSR | 853 |
| DRB10404 | ORF1b polyprotein - | VIPTITQMNLKYAIS | 854 |
| DRB10404 | ORF1b polyprotein - | FHQKLLKSIAATRGA | 855 |
| DRB10404 | ORF1b polyprotein - | VFNICQAVTANVNAL | 856 |
| DRB10404 | ORF1b polyprotein - | VASIKNFKSVLYYQN | 857 |
| DRB10404 | ORF1b polyprotein - | STSHKLVLSVNPYVC | 858 |
| DRB10404 | ORF1b polyprotein - | LANTCTERLKLFAAE | 859 |
| DRB10404 | ORF1b polyprotein - | HTVMPLSAPTLVPQE | 860 |
| DRB10404 | ORF1b polyprotein - | AVFISPYNSQNAVAS | 861 |
| DRB10404 | ORF1b polyprotein - | LHPTQAPTHLSVDTK | 862 |
| DRB10404 | ORFlb polyprotein - | LISMMGFKMNYQVNG | 863 |
| DRB10404 | ORF1b polyprotein - | EAIRHVRAWIGFDVE | 864 |
| DRB10404 | ORF1b polyprotein - | STGVNLVAVPTGYVD | 865 |
| DRB10404 | ORF1b polyprotein - | FPVLHDIGNPKAIKC | 866 |
| DRB10404 | ORF1b polyprotein - | KAIKCVPQADVEWKF | 867 |
| DRB10404 | ORF1b polyprotein - | FDKSAFVNLKQLPFF | 868 |
| DRB10404 | ORF1b polyprotein - | YNLWNTFTRLQSLEN | 869 |
| DRB10404 | ORF1b polyprotein - | TRLQSLENVAFNVVN | 870 |
| DRB10404 | ORF1b polyprotein - | PVPEVKILNNLGVDI | 871 |
| DRB10404 | ORF1b polyprotein - | PAHISTIGVCSMTDI | 872 |
| DRB10404 | ORF1b polyprotein - | TVKNYFITDAQTGSS | 873 |
| DRB10404 | ORF1b polyprotein - | VEIIKSQDLSVVSKV | 874 |
| DRB10404 | ORF1b polyprotein - | LNTLTLAVPYNMRVI | 875 |
| DRB10404 | ORF1b polyprotein - | AFLIGCNYLGKPREQ | 876 |
| DRB10404 | ORF1b polyprotein - | ANYIFWRNTNPIQLS | 877 |
| DRB10404 | ORF1b polyprotein - | KFPLKLRGTAVMSLK | 878 |
| DRB10404 | ORF1b polyprotein - | KGRLIIRENNRVVIS | 879 |
| DRB10404 | nucleocapsid | NKDGIIWVATEGALN | 880 |
| | phosphoprotein - | | |
| DRB10404 | nucleocapsid | ATKAYNVTQAFGRRG | 881 |
| | phosphoprotein - | | |
| DRB10404 | nucleocapsid | PQIAQFAPSASAFFG | 882 |
| | phosphoprotein - | | |
| DRB10404 | nucleocapsid | FGMSRIGMEVTPSGT | 883 |
| | phosphoprotein - | | |
| DRB10404 | membrane glycoprotein | FRLFARTRSMWSFNP | 884 |
| DRB10404 | membrane glycoprotein | LNVPLHGTILTRPLL | 885 |
| DRB10404 | membrane glycoprotein | GDSGFAAYSRYRIGN | 886 |
| DRB10404 | envelope protein - | VYSRVKNLNSSRVPD | 887 |
| DRB11501 | spike glycoprotein - | NIDGYFKIYSKHTPI | 888 |
| DRB11501 | spike glycoprotein - | GINITRFQTLLALHR | 889 |
| DRB11501 | spike glycoprotein - | QTLLALHRSYLTPGD | 890 |
| DRB11501 | spike glycoprotein - | EVFNATRFASVYAWN | 891 |
| DRB11501 | spike glycoprotein - | FASVYAWNRKRISNC | 892 |
| DRB11501 | spike glycoprotein - | TESNKKFLPFQQFGR | 893 |
| DRB11501 | spike glycoprotein - | ASQSIIAYTMSLGAE | 894 |
| DRB11501 | spike glycoprotein - | VFAQVKQIYKTPPIK | 895 |
| DRB11501 | spike glycoprotein - | QILPDPSKPSKRSFI | 896 |
| DRB11501 | spike glycoprotein - | IPFAMQMAYRFNGIG | 897 |
| DRB11501 | spike glycoprotein - | LITGRLQSLQTYVTQ | 898 |
| DRB11501 | spike glycoprotein - | QLIRAAEIRASANLA | 899 |
| DRB11501 | ORF8 - | PIHFYSKWYIRVGAR | 900 |
| DRB11501 | ORF8 - | WYIRVGARKSAPLIE | 901 |
| DRB11501 | ORF7a - | KHVYQLRARSVSPKL | 902 |
| DRB11501 | ORF3a - | DFVRATATIPIQASL | 903 |
| DRB11501 | ORF3a - | AVFQSASKIITLKKR | 904 |
| DRB11501 | ORF3a - | KIITLKKRWQLALSK | 905 |
| DRB11501 | ORF1a polyprotein - | VFIKRSDARTAPHGH | 906 |
| DRB11501 | ORF1a polyprotein - | VGEIPVAYRKVLLRK | 907 |
| DRB11501 | ORF1a polyprotein - | YRKVLLRKNGNKGAG | 908 |
| DRB11501 | ORF1a polyprotein - | LLRKNGNKGAGGHSY | 909 |
| DRB11501 | ORF1a polyprotein - | QTPFEIKLAKKFDTF | 910 |
| DRB11501 | ORF1a polyprotein - | NSIIKTIQPRVEKKK | 911 |
| DRB11501 | ORF1a polyprotein - | KKKLDGFMGRIRSVY | 912 |
| DRB11501 | ORF1a polyprotein - | SGLKTILRKGGRTIA | 913 |
| DRB11501 | ORF1a polyprotein - | VETVKGLDYKAFKQI | 914 |
| DRB11501 | ORF1a polyprotein - | FKVTKGKAKKGAWNI | 915 |
| DRB11501 | ORF1a polyprotein - | EAARVVRSIFSRTLE | 916 |
| DRB11501 | ORF1a polyprotein - | AQNSVRVLQKAAM | 917 |
| DRB11501 | ORF1a polyprotein - | IIGGAKLKALNLGET | 918 |
| DRB11501 | ORF1a polyprotein - | VVNAANVYLKHGGGV | 919 |
| DRB11501 | ORF1a polyprotein - | GALNKATNNAMQVES | 920 |
| DRB11501 | ORF1a polyprotein - | ETKAIVSTIQRKYKG | 921 |
| DRB11501 | ORF1a polyprotein - | EAARYMRSLKVPATV | 922 |
| DRB11501 | ORF1a polyprotein - | LKTLLSLREVRTIKV | 923 |
| DRB11501 | ORF1a polyprotein - | REVRTIKVFTTVDNI | 924 |
| DRB11501 | ORF1a polyprotein - | QESPFVMMSAPPAQY | 925 |
| DRB11501 | ORF1a polyprotein - | LNQLTGYKKPASREL | 926 |
| DRB11501 | ORF1a polyprotein - | VVAIDYKHYTPSFKK | 927 |
| DRB11501 | ORF1a polyprotein - | RVLGLKTLATHGLAA | 928 |
| DRB11501 | ORF1a polyprotein - | TIANYAKPFLNKVVS | 929 |
| DRB11501 | ORF1a polyprotein - | LINIIIWFLLLSVCL | 930 |
| DRB11501 | ORF1a polyprotein - | NLVQMAPISAMVRMY | 931 |
| DRB11501 | ORF1a polyprotein - | STCMMCYKRNRATRV | 932 |
| DRB11501 | ORF1a polyprotein - | RDLSLQFKRPINPTD | 933 |
| DRB11501 | ORF1a polyprotein - | LSTFISAARQGFVDS | 934 |
| DRB11501 | ORF1a polyprotein - | SHQSDIEVTGDSCNN | 935 |
| DRB11501 | ORF1a polyprotein - | MLTYNKVENMTPRDL | 936 |
| DRB11501 | ORF1a polyprotein - | ARHINAQVAKSHNIA | 937 |
| DRB11501 | ORF1a polyprotein - | LSEQLRKQIRSAAKK | 938 |
| DRB11501 | ORF1a polyprotein - | VTTKIALKGGKIVNN | 939 |
| DRB11501 | ORF1a polyprotein - | IIGYKAIDGGVTRDI | 940 |
| DRB11501 | ORF1a polyprotein - | DVLLPLTQYNRYLAL | 941 |
| DRB11501 | ORF1a polyprotein - | QYNRYLALYNKYKYF | 942 |
| DRB11501 | ORF1a polyprotein - | YLALYNKYKYFSGAM | 943 |
| DRB11501 | ORF1a polyprotein - | SAVLQSGFRKMAFPS | 944 |
| DRB11501 | ORF1a polyprotein - | LLIRKSNHNFLVQAG | 945 |
| DRB11501 | ORF1a polyprotein - | QAGNVQLRVIGHSMQ | 946 |
| DRB11501 | ORF1a polyprotein - | GVTFQSAVKRTIKGT | 947 |
| DRB11501 | ORF1a polyprotein - | MSAFAMMFVKHKHAF | 948 |
| DRB11501 | ORF1a polyprotein - | EFRYMNSQGLLPPKN | 949 |
| DRB11501 | ORF1a polyprotein - | LNIKLLGVGGKPCIK | 950 |
| DRB11501 | ORF1a polyprotein - | EVVLKKLKKSLNVAK | 951 |
| DRB11501 | ORF1a polyprotein - | ADQAMTQMYKQARSE | 952 |
| DRB11501 | ORF1a polyprotein - | IVTALRANSAVKLQN | 953 |
| DRB11501 | ORF1a polyprotein - | ALAYYNTTKGGRFVL | 954 |
| DRB11501 | ORF1b polyprotein - | YFVVKRHTFSNYQHE | 955 |
| DRB11501 | ORF1b polyprotein - | GDMVPHISRQRLTKY | 956 |
| DRB11501 | ORF1b polyprotein - | DILRVYANLGERVRQ | 957 |
| DRB11501 | ORF1b polyprotein - | ILTLTRALTAESHVD | 958 |
| DRB11501 | ORF1b polyprotein - | FPFNKWGKARLYYDS | 959 |
| DRB11501 | ORF1b polyprotein - | DALFAYTKRNVIPTI | 960 |
| DRB11501 | ORF1b polyprotein - | PTITQMNLKYAISAK | 961 |
| DRB11501 | ORF1b polyprotein - | LKYAISAKNRARTVA | 962 |
| DRB11501 | ORF1b polyprotein - | KLLKSIAATRGATVV | 963 |
| DRB11501 | ORF1b polyprotein - | PNMLRIMASLVLARK | 964 |
| DRB11501 | ORF1b polyprotein - | SQGLVASIKNFKSVL | 965 |
| DRB11501 | ORF1b polyprotein - | HTVMPLSAPTLVPQE | 966 |
| DRB11501 | ORF1b polyprotein - | NVANYQKVGMQKYST | 967 |
| DRB11501 | ORF1b polyprotein - | FAIGLALYYPSARIV | 968 |
| DRB11501 | ORF1b polyprotein - | NYDLSVVNARLRAKH | 969 |
| DRB11501 | ORF1b polyprotein - | ALVYDNKLKAHKDKS | 970 |
| DRB11501 | ORF1b polyprotein - | CFKMFYKGVITHDVS | 971 |
| DRB11501 | ORF1b polyprotein - | VVREFLTRNPAWRKA | 972 |
| DRB11501 | ORF1b polyprotein - | VFISPYNSQNAVASK | 973 |
| DRB11501 | ORF1b polyprotein - | GIPKDMTYRRLISMM | 974 |
| DRB11501 | ORF1b polyprotein - | LISMMGFKMNYQVNG | 975 |
| DRB11501 | ORF1b polyprotein - | DQFKHLIPLMYKGLP | 976 |
| DRB11501 | ORF1b polyprotein - | FELTSMKYFVKIGPE | 977 |
| DRB11501 | ORF1b polyprotein - | QHMVVKAALLADKFP | 978 |
| DRB11501 | ORF1b polyprotein - | VAFELWAKRNIKPVP | 979 |
| DRB11501 | ORF1b polyprotein - | KRNIKPVPEVKILNN | 980 |
| DRB11501 | ORF1b polyprotein - | KPVPEVKILNNLGVD | 981 |
| DRB11501 | ORF1b polyprotein - | NTVIWDYKRDAPAHI | 982 |
| DRB11501 | ORF1b polyprotein - | TQFNYYKKVDGVVQQ | 983 |
| DRB11501 | ORF1b polyprotein - | LLIGLAKRFKESPFE | 984 |
| DRB11501 | ORF1b polyprotein - | PGVAMPNLYKMQRML | 985 |
| DRB11501 | ORF1b polyprotein - | LNTLTLAVPYNMRVI | 986 |
| DRB11501 | ORF1b polyprotein - | RVIHFGAGSDKGVAP | 987 |
| DRB11501 | ORF1b polyprotein - | KFPLKLRGTAVMSLK | 988 |
| DRB11501 | ORF1b polyprotein - | LSLLSKGRLIIRENN | 989 |
| DRB11501 | ORF1b polyprotein - | RLIIRENNRVVISSD | 990 |
| DRB11501 | ORF1b polyprotein - | RENNRVVISSDVLVN | 991 |
| DRB11501 | nucleocapsid | SSPDDQIGYYRRATR | 992 |
| | phosphoprotein - | | |
| DRB11501 | nucleocapsid | GYYRRATRRIRGGDG | 993 |
| | phosphoprotein - | | |
| DRB11501 | nucleocapsid | RATRRIRGGDGKMKD | 994 |
| | phosphoprotein - | | |
| DRB11501 | nucleocapsid | LNKHIDAYKTFPPTE | 995 |
| | phosphoprotein - | | |
| DRB11501 | membrane glycoprotein | SFRLFARTRSMWSFN | 996 |
| DRB11501 | membrane glycoprotein | AVILRGHLRIAGHHL | 997 |
| DRB11501 | membrane glycoprotein | GDSGFAAYSRYRIGN | 998 |
| DRB11501 | envelope protein - | VKPSFYVYSRVKNLN | 999 |
| DPA10202B10501 | spike glycoprotein - | PDKVFRSSVLHSTQD | 1000 |
| DPA10202B10501 | spike glycoprotein - | INITRFQTLLALHRS | 1001 |
| DPA10202B10501 | spike glycoprotein - | YRLFRKSNLKPFERD | 1002 |
| DPA10202B10501 | spike glycoprotein - | VLTESNKKFLPFQQF | 1003 |
| DPA10202B10501 | spike glycoprotein - | RRARSVASQSIIAYT | 1004 |
| DPA10202B10501 | spike glycoprotein - | IAYTMSLGAENSVAY | 1005 |
| DPA10202B10501 | spike glycoprotein - | TNFTISVTTEILPVS | 1006 |
| DPA10202B10501 | spike glycoprotein - | VFAQVKQIYKTPPIK | 1007 |
| DPA10202B10501 | spike glycoprotein - | FSQILPDPSKPSKRS | 1008 |
| DPA10202B10501 | spike glycoprotein - | IPFAMQMAYRFNGIG | 1009 |
| DPA10202B10501 | spike glycoprotein - | GKIQDSLSSTASALG | 1010 |
| DPA10202B10501 | spike glycoprotein - | ALNTLVKQLSSNFGA | 1011 |
| DPA10202B10501 | spike glycoprotein - | LITGRLQSLQTYVTQ | 1012 |
| DPA10202B10501 | spike glycoprotein - | QLIRAAEIRASANLA | 1013 |
| DPA10202B10501 | spike glycoprotein - | IRASANLAATKMSEC | 1014 |
| DPA10202B10501 | ORF8 - | KWYIRVGARKSAPLI | 1015 |
| DPA10202B10501 | ORF7a - | KHVYQLRARSVSPKL | 1016 |
| DPA10202B10501 | ORF6 - | NLIIKNLSKSLTENK | 1017 |
| DPA10202B10501 | ORF3a - | SDFVRATATIPIQAS | 1018 |
| DPA10202B10501 | ORF3a - | AVFQSASKIITLKKR | 1019 |
| DPA10202B10501 | ORF3a - | KIITLKKRWQLALSK | 1020 |
| DPA10202B10501 | ORF1a polyprotein - | SLPVLQVRDVLVRGF | 1021 |
| DPA10202B10501 | ORF1a polyprotein - | LEQPYVFIKRSDART | 1022 |
| DPA10202B10501 | ORF1a polyprotein - | PVAYRKVLLRKNGNK | 1023 |
| DPA10202B10501 | ORF1a polyprotein - | PFEIKLAKKFDTFNG | 1024 |
| DPA10202B10501 | ORF1a polyprotein - | FPLNSIIKTIQPRVE | 1025 |
| DPA10202B10501 | ORF1a polyprotein - | FMGRIRSVYPVASPN | 1026 |
| DPA10202B10501 | ORF1a polyprotein - | NESGLKTILRKGGRT | 1027 |
| DPA10202B10501 | ORF1a polyprotein - | LEILQKEKVNINIVG | 1028 |
| DPA10202B10501 | ORF1a polyprotein - | LSPLYAFASEAARVV | 1029 |
| DPA10202B10501 | ORF1a polyprotein - | ARVVRSIFSRTLETA | 1030 |
| DPA10202B10501 | ORF1a polyprotein - | TAQNSVRVLQKAAIT | 1031 |
| DPA10202B10501 | ORF1a polyprotein - | RLIDAMMFTSDLATN | 1032 |
| DPA10202B10501 | ORF1a polyprotein - | ALAPNMMVTNNTFTL | 1033 |
| DPA10202B10501 | ORF1a polyprotein - | VIKTLQPVSELLTPL | 1034 |
| DPA10202B10501 | ORF1a polyprotein - | SGYLKLTDNVYIKNA | 1035 |
| DPA10202B10501 | ORF1a polyprotein - | KPTVVVNAANVYLKH | 1036 |
| DPA10202B10501 | ORF1a polyprotein - | VAGALNKATNNAMQV | 1037 |
| DPA10202B10501 | ORF1a polyprotein - | ITESKPSVEQRKQDD | 1038 |
| DPA10202B10501 | ORF1a polyprotein - | TFLKKDAPYIVGDVV | 1039 |
| DPA10202B10501 | ORF1a polyprotein - | TAVVIPTKKAGGTTE | 1040 |
| DPA10202B10501 | ORF1a polyprotein - | ARYMRSLKVPATVSV | 1041 |
| DPA10202B10501 | ORF1a polyprotein - | KVPATVSVSSPDAVT | 1042 |
| DPA10202B10501 | ORF1a polyprotein - | LQQIELKFNPPALQD | 1043 |
| DPA10202B10501 | ORF1a polyprotein - | PSFKKGAKLLHKPIV | 1044 |
| DPA10202B10501 | ORF1a polyprotein - | KLLHKPIVWFWNNAT | 1045 |
| DPA10202B10501 | ORF1a polyprotein - | SLTIKKPNELSRVLG | 1046 |
| DPA10202B10501 | ORF1a polyprotein - | VLGLKTLATHGLAAV | 1047 |
| DPA10202B10501 | ORF1a polyprotein - | LNKVVSTTTNIVTRC | 1048 |
| DPA10202B10501 | ORF1a polyprotein - | CTFTRSTNSRIKASM | 1049 |
| DPA10202B10501 | ORF1a polyprotein - | RIKASMPTTIAKNTV | 1050 |
| DPA10202B10501 | ORF1a polyprotein - | RDLSLQFKRPINPTD | 1051 |
| DPA10202B10501 | ORF1a polyprotein - | NAQVAKSHNIALIWN | 1052 |
| DPA10202B10501 | ORF1a polyprotein - | ATTRQVVNVVTTKIA | 1053 |
| DPA10202B10501 | ORF1a polyprotein - | KIALKGGKIVNNWLK | 1054 |
| DPA10202B10501 | ORF1a polyprotein - | CPLIAAVITREVGFV | 1055 |
| DPA10202B10501 | ORF1a polyprotein - | GTILRTTNGDFLHFL | 1056 |
| DPA10202B10501 | ORF1a polyprotein - | NYLKRRVVFNGVSFS | 1057 |
| DPA10202B10501 | ORF1a polyprotein - | DLLIRKSNHNFLVQA | 1058 |
| DPA10202B10501 | ORF1a polyprotein - | LVQAGNVQLRVIGHS | 1059 |
| DPA10202B10501 | ORF1a polyprotein - | PKYKFVRIQPGQTFS | 1060 |
| DPA10202B10501 | ORF1a polyprotein - | IISVTSNYSGVVTTV | 1061 |
| DPA10202B10501 | ORF1a polyprotein - | SIDAFKLNIKLLGVG | 1062 |
| DPA10202B10501 | ORF1a polyprotein - | CIKVATVQSKMSDVK | 1063 |
| DPA10202B10501 | ORF1a polyprotein - | VLKKLKKSLNVAKSE | 1064 |
| DPA10202B10501 | ORF1a polyprotein - | AMTQMYKQARSEDKR | 1065 |
| DPA10202B10501 | ORF1a polyprotein - | DKRAKVTSAMQTMLF | 1066 |
| DPA10202B10501 | ORF1a polyprotein - | FTMLRKLDNDALNNI | 1067 |
| DPA10202B10501 | ORF1a polyprotein - | IPLTTAAKLMVVIPD | 1068 |
| DPA10202B10501 | ORF1a polyprotein - | IVTALRANSAVKLQN | 1069 |
| DPA10202B10501 | ORF1a polyprotein - | YNTTKGGRFVLALLS | 1070 |
| DPA10202B10501 | ORF1a polyprotein - | FIKGLNNLNRGMVLG | 1071 |
| DPA10202B10501 | ORF1a polyprotein - | LGSLAATVRLQAGNA | 1072 |
| DPA10202B10501 | ORF1b polyprotein - | SYFVVKRHTFSNYQH | 1073 |
| DPA10202B10501 | ORF1b polyprotein - | PILTLTRALTAESHV | 1074 |
| DPA10202B10501 | ORF1b polyprotein - | PAMHAASGNLLLDKR | 1075 |
| DPA10202B10501 | ORF1b polyprotein - | ALFAYTKRNVIPTIT | 1076 |
| DPA10202B10501 | ORF1b polyprotein - | IPTITQMNLKYAISA | 1077 |
| DPA10202B10501 | ORF1b polyprotein - | NLKYAISAKNRARTV | 1078 |
| DPA10202B10501 | ORF1b polyprotein - | QKLLKSIAATRGATV | 1079 |
| DPA10202B10501 | ORF1b polyprotein - | VIGTSKFYGGWHNML | 1080 |
| DPA10202B10501 | ORF1b polyprotein - | MASLVLARKHTTCCS | 1081 |
| DPA10202B10501 | ORF1b polyprotein - | LLSTDGNKIADKYVR | 1082 |
| DPA10202B10501 | ORF1b polyprotein - | ASQGLVASIKNFKSV | 1083 |
| DPA10202B10501 | ORF1b polyprotein - | VISTSHKLVLSVNPY | 1084 |
| DPA10202B10501 | ORF1b polyprotein - | LSYGIATVREVLSDR | 1085 |
| DPA10202B10501 | ORF1b polyprotein - | TSHTVMPLSAPTLVP | 1086 |
| DPA10202B10501 | ORF1b polyprotein - | VANYQKVGMQKYSTL | 1087 |
| DPA10202B10501 | ORF1b polyprotein - | IVDTVSALVYDNKLK | 1088 |
| DPA10202B10501 | ORF1b polyprotein - | HDVSSAINRPQIGVV | 1089 |
| DPA10202B10501 | ORF1b polyprotein - | ASKILGLPTQTVDSS | 1090 |
| DPA10202B10501 | ORF1b polyprotein - | RRLISMMGFKMNYQV | 1091 |
| DPA10202B10501 | ORF1b polyprotein - | PPGDQFKHLIPLMYK | 1092 |
| DPA10202B10501 | ORF1b polyprotein - | HMVVKAALLADKFPV | 1093 |
| DPA10202B10501 | ORF1b polyprotein - | VDLFRNARNGVLITE | 1094 |
| DPA10202B10501 | ORF1b polyprotein - | IGLAKRFKESPFELE | 1095 |
| DPA10202B10501 | ORF1b polyprotein - | ATLPKGIMMNVAKYT | 1096 |
| DPA10202B10501 | ORF1b polyprotein - | QWLPTGTLLVDSDLN | 1097 |
| DPA10202B10501 | ORF1b polyprotein - | LGGSVAIKITEHSWN | 1098 |
| DPA10202B10501 | ORF1b polyprotein - | PLKLRGTAVMSLKEG | 1099 |
| DPA10202B10501 | ORF1b polyprotein - | ILSLLSKGRLIIREN | 1100 |
| DPA10202B10501 | ORF1b polyprotein - | GRLIIRENNRVVISS | 1101 |
| DPA10202B10501 | nucleocapsid | DQIGYYRRATRRIRG | 1102 |
| | phosphoprotein - | | |
| DPA10202B10501 | nucleocapsid | IGTRNPANNAAIVLQ | 1103 |
| | phosphoprotein - | | |
| DPA10202B10501 | nucleocapsid | QLESKMSGKGQQQQG | 1104 |
| | phosphoprotein - | | |
| DPA10202B10501 | nucleocapsid | ASAFFGMSRIGMEVT | 1105 |
| | phosphoprotein - | | |
| DPA10202B10501 | nucleocapsid | VILLNKHIDAYKTFP | 1106 |
| | phosphoprotein - | | |
| DPA10202B10501 | nucleocapsid | PQRQKKQQTVTLLPA | 1107 |
| | phosphoprotein - | | |
| DPA10202B10501 | membrane glycoprotein | IASFRLFARTRSMWS | 1108 |
| DPA10202B10501 | membrane glycoprotein | IGAVILRGHLRIAGH | 1109 |
| DPA10202B10501 | envelope protein - | SFVSEETGTLIVNSV | 1110 |

[0186] The TCRs set forth in TABLE 1, including their clonotypes, are set forth in TABLE 5, and nucleotide sequences encoding exemplary corresponding TCRs are set forth in TABLE 6.

TABLE 5

| | CDR3 alpha | | | | CDR3 beta | | | |
|---|---|---|---|---|---|---|---|---|
| | | SEQ | Alpha | Alpha | | SEQ | Beta | Beta |
| TCR ID | Sequence | ID NO | V gene | J gene | Sequence | ID NO | V gene | J gene |
| TCR_1 | CAMYEGNEKL | 417 | TRAV14/ | TRAJ48 | CASGGLMRGL | 538 | TRBV9 | TRBJ2-3 |
| | TF | | DV4 | | DTQYF | | | |
| TCR_2 | CLVGNNARLM | 418 | TRAV4 | TRAJ31 | CASSLDRESM | 539 | TRBV5- | TRBJ1-1 |
| | F | | | | NIEAFF | | 4 | |
| TCR_3 | CAVRSHGSGG | 419 | TRAV41 | TRAJ53 | CASRELGQETQ | 540 | TRBV19 | TRBJ2-5 |
| | SNYKLTF | | | | YF | | | |
| TCR_4 | CAVVTPPARL | 420 | TRAV39 | TRAJ31 | CASSPLTGQGL | 541 | TRBV28 | TRBJ2-7 |
| | MF | | | | GGAYEQYF | | | |
| TCR_5 | CVVNEGDKIIF | 421 | TRAV12- | TRAJ30 | CASSADIEQYF | 542 | TRBV7- | TRBJ2-7 |
| | | | 1 | | | | 9 | |
| TCR_6 | CAMREASASG | 422 | TRAV14/ | TRAJ6 | CASSTYRGQPQ | 543 | TRBV28 | TRBJ1-5 |
| | GSYIPTF | | DV4 | | HF | | | |
| TCR_7 | CAAVNNNARL | 423 | TRAV38- | TRAJ31 | CASSEGESNTG | 544 | TRBV9 | TRBJ2-2 |
| | MF | | 2/DV8 | | ELFF | | | |
| TCR_8 | CVVNSGNKLV | 424 | TRAV12- | TRAJ47 | CASSADAGTSS | 545 | TRBV9 | TRBJ2-1 |
| | F | | 1 | | EQFF | | | |
| TCR_9 | CAGRTFDKIIF | 425 | TRAV25 | TRAJ30 | CASSIVPGSPSR | 546 | TRBV19 | TRBJ1-2 |
| | | | | | GYTF | | | |
| TCR_10 | CVVTPRGSTLG | 426 | TRAV12- | TRAJ18 | CASSTEDRVSY | 547 | TRBV5- | TRBJ2-1 |
| | RLYF | | 1 | | NEQFF | | 1 | |
| TCR_11 | CAVQAPMSAR | 427 | TRAV20 | TRAJ42 | CASSSKGGGQ | 548 | TRBV7- | TRBJ2-5 |
| | GSQGNLIF | | | | QTQYF | | 2 | |
| TCR_12 | CAVKTDMRF | 428 | TRAV12- | TRAJ43 | CASSDRDSVN | 549 | TRBV7- | TRBJ1-2 |
| | | | 2 | | YGYTF | | 8 | |
| TCR_13 | CVVTRSQGNLI | 429 | TRAV12- | TRAJ42 | CASRASGGFNE | 550 | TRBV12- | TRBJ2-1 |
| | F | | 1 | | QFF | | 5 | |
| TCR_14 | CVVNAPSGNT | 430 | TRAV12- | TRAJ29 | CSARDRQGQN | 551 | TRBV20- | TRBJ2-2 |
| | PLVF | | 1 | | TGELFF | | 1 | |
| TCR_15 | CAGLGTGRRA | 431 | TRAV3 | TRAJ5 | CAISERDFQET | 552 | TRBV10- | TRBJ2-5 |
| | LTF | | | | QYF | | 3 | |
| TCR_16 | CVVNKEDRLM | 432 | TRAV12- | TRAJ31 | CASHSDRNTG | 553 | TRBV7- | TRBJ2-2 |
| | F | | 1 | | ELFF | | 8 | |
| TCR_17 | CAMREGPAEG | 433 | TRAV14/ | TRAJ56 | CASNLLTGGD | 554 | TRBV27 | TRBJ2-3 |
| | GANSKLTF | | DV4 | | ADTQYF | | | |
| TCR_18 | CAVRQNDKIIF | 434 | TRAV21 | TRAJ30 | CASSLAGAQG | 555 | TRBVS- | TRBJ1-2 |
| | | | | | YTF | | 1 | |
| TCR_19 | CVVTGAGSYQ | 435 | TRAV8-2 | TRAJ28 | CATSDDSEKLF | 556 | TRBV24- | TRBJ1-4 |
| | LTF | | | | F | | 1 | |
| TCR_20 | CVVNMATDKL | 436 | TRAV12- | TRAJ34 | CASGGTNTGE | 557 | TRBV2 | TRBJ2-2 |
| | IF | | 1 | | LFF | | | |
| TCR_21 | CAGGPSRNND | 437 | TRAV27 | TRAJ43 | CASSPALGREQ | 558 | TRBV27 | TRBJ2-7 |
| | MRF | | | | YF | | | |
| TCR_22 | CAVIVAGNTPL | 438 | TRAV8-1 | TRAJ29 | CASSFGGSTEA | 559 | TRBV11- | TRBJ1-1 |
| | VF | | | | FF | | 1 | |
| TCR_23 | CVVNPTGTAS | 439 | TRAV12- | TRAJ44 | CASSVAGGLY | 560 | TRBV9 | TRBJ2-1 |
| | KLTF | | 1 | | EQFF | | | |
| TCR_24 | CVVITGGYNK | 440 | TRAV12- | TRAJ4 | CASSLIGAGST | 561 | TRBVS- | TRBJ2-3 |
| | LIF | | 1 | | DTQYF | | 1 | |
| TCR_25 | CAAIGGSTLGR | 441 | TRAV29/ | TRAJ18 | CASSPIKDTRQ | 562 | TRBV28 | TRBJ2-2 |
| | LYF | | DVS | | EYTGELFF | | | |
| TCR_26 | CAVGDGNNRL | 442 | TRAV8-3 | TRAJ7 | CASSLGTASTD | 563 | TRBV27 | TRBJ2-3 |
| | AF | | | | TQYF | | | |
| TCR_27 | CAWILSGNTPL | 443 | TRAV8-1 | TRAJ29 | CASSLGTGGTE | 564 | TRBV11- | TRBJ1-1 |
| | VF | | | | AFF | | 2 | |
| TCR_28 | CVVNKEDRLM | 432 | TRAV12- | TRAJ31 | CSVDRDRNTG | 565 | TRBV29- | TRBJ2-2 |
| | F | | 1 | | ELFF | | 1 | |
| TCR_29 | CALGNTGGFK | 444 | TRAV24 | TRAJ9 | CASSVEVQARS | 566 | TRBV9 | TRBJ2-3 |
| | TIF | | | | DTQYF | | | |
| TCR_30 | CALGALTGQN | 445 | TRAV16 | TRAJ26 | CASSRLESLGN | 567 | TRBV25- | TRBJ1-3 |
| | FVF | | | | TIYF | | 1 | |
| TCR_31 | CAFPSGGSNY | 446 | TRAV24 | TRAJ53 | CSARDIGTGAH | 568 | TRBV20- | TRBJ2-7 |
| | KLTF | | | | YEQYF | | 1 | |
| TCR_32 | CGTAFFNAGG | 447 | TRAV30 | TRAJ52 | CASSPGASYNE | 569 | TRBV6- | TRBJ2-1 |
| | TSYGKLTF | | | | QFF | | 6 | |
| TCR_33 | CVVNDPNSGN | 448 | TRAV12- | TRAJ29 | CSARDQASQN | 570 | TRBV20- | TRBJ2-2 |
| | TPLVF | | 1 | | TGELFF | | 1 | |
| TCR_34 | CAYMDNNDM | 449 | TRAV38- | TRAJ43 | CASSDGQGGY | 571 | TRBV9 | TRBJ1-2 |
| | RF | | 2/DV8 | | GYTF | | | |
| TCR_35 | CAYHERALTF | 450 | TRAV38- | TRAJ5 | CASSHGTTTYN | 572 | TRBV5- | TRBJ2-1 |
| | | | 2/DV8 | | EQFF | | 1 | |
| TCR_36 | CLAVNTDKLIF | 451 | TRAV4 | TRAJ34 | CASSRTGGSYN | 573 | TRBV5- | TRBJ2-1 |
| | | | | | EQFF | | 1 | |
| TCR_37 | CAMQSDSWG | 452 | TRAV12- | TRAJ24 | CSASPLLEQYF | 574 | TRBV20- | TRBJ2-7 |
| | KLQF | | 3 | | | | 1 | |
| TCR_38 | CAGAGGQKLL | 453 | TRAV27 | TRAJ16 | CASSQDSGTGS | 575 | TRBV4- | TRBJ1-3 |
| | F | | | | KNTIYF | | 1 | |
| TCR_39 | CGTESPGNND | 454 | TRAV30 | TRAJ43 | CASSSSALEDP | 576 | TRBV5- | TRBJ2-7 |
| | MRF | | | | EQYF | | 4 | |
| TCR_40 | CLVGGWVSGG | 455 | TRAV4 | TRAJ6 | CASKTGGAAK | 577 | TRBV2 | TRBJ2-4 |
| | SYIPTF | | | | NIQYF | | | |
| TCR_41 | CALMEANQGG | 456 | TRAV19 | TRAJ23 | CASSVGGSWT | 578 | TRBV9 | TRBJ2-3 |
| | KLIF | | | | DTQYF | | | |
| TCR_42 | CAASTGGQKL | 457 | TRAV13- | TRAJ16 | CASSDLAQYL | 579 | TRBV5- | TRBJ2-2 |
| | LF | | 2 | | NTGELFF | | 4 | |
| TCR_43 | CVVNKDNDM | 458 | TRAV12- | TRAJ43 | CASQDINTGEL | 580 | TRBV6- | TRBJ2-2 |
| | RF | | 1 | | FF | | 2 | |
| TCR_44 | CAGARSGNTG | 459 | TRAV27 | TRAJ37 | CASSLGPGQG | 581 | TRBV7- | TRBJ2-1 |
| | KLIF | | | | YNEQFF | | 6 | |
| TCR_45 | CAAGRDDKIIF | 460 | TRAV12- | TRAJ30 | CASSSMTSGIR | 582 | TRBV6- | TRBJ2-7 |
| | | | 2 | | YEQYF | | 2 | |
| TCR_46 | CAMRGAINTG | 461 | TRAV14/ | TRAJ44 | CAISESWTSGI | 583 | TRBV10- | TRBJ2-5 |
| | TASKLTF | | DV4 | | GREETQYF | | 3 | |
| TCR_47 | CALSVRIQGAQ | 462 | TRAV19 | TRAJ54 | CASSLYEDRA | 584 | TRBV13 | TRBJ2-7 |
| | KINF | | | | NWEQYF | | | |
| TCR_48 | CAVWRFQKLV | 463 | TRAV21 | TRAJ8 | CSAQSQLRVLE | 585 | TRBV20- | TRBJ2-5 |
| | F | | | | ETQYF | | 1 | |
| TCR_49 | CVVNSGNTPL | 464 | TRAV12- | TRAJ29 | CASSYLYRVA | 586 | TRBV6- | TRBJ2-2 |
| | VF | | 1 | | GELFF | | 1 | |
| TCR_50 | CAYIETGNQFY | 465 | TRAV38- | TRAJ49 | CASSTGTVGYE | 587 | TRBV27 | TRBJ2-7 |
| | F | | 2/DV8 | | QYF | | | |
| TCR_51 | CAYIENNARL | 466 | TRAV38- | TRAJ31 | CASSLQGTGY | 588 | TRBV27 | TRBJ1-2 |
| | MF | | 2/DV8 | | GYTF | | | |
| TCR_52 | CAESALGGSQ | 467 | TRAV5 | TRAJ42 | CASRSWVRAP | 589 | TRBV6- | TRBJ1-5 |
| | GNLIF | | | | NQPQHF | | 1 | |
| TCR_53 | CVVRYDSWGK | 468 | TRAV12- | TRAJ24 | CASSLASNNYE | 590 | TRBV28 | TRBJ2-7 |
| | LQF | | 1 | | QYF | | | |
| TCR_54 | CVVRADSWGK | 469 | TRAV12- | TRAJ24 | CASSFSSNSYE | 591 | TRBV28 | TRBJ2-7 |
| | LQF | | 1 | | QYF | | | |
| TCR_55 | CALIGGSNDY | 470 | TRAV9-2 | TRAJ20 | CAKLVTGAVS | 592 | TRBV2 | TRBJ2-1 |
| | KLSF | | | | GEQFF | | | |
| TCR_56 | CATGNNNDMR | 471 | TRAV17 | TRAJ43 | CASSSSTGGNY | 593 | TRBV12- | TRBJ1-2 |
| | F | | | | GYTF | | 3 | |
| TCR_57 | CAILQGAQKL | 472 | TRAV12- | TRAJ54 | CASSLVSGELF | 594 | TRBV19 | TRBJ2-2 |
| | VF | | 3 | | F | | | |
| TCR_58 | CALSESGSTGD | 473 | TRAV19 | TRAJ20 | CATNPAGGPY | 595 | TRBV19 | TRBJ2-1 |
| | YKLSF | | | | NEQFF | | | |
| TCR_59 | CAGQRDDMRF | 474 | TRAV35 | TRAJ43 | CATSGDRGWQ | 596 | TRBV12- | TRBJ2-7 |
| | | | | | YF | | 3 | |
| TCR_60 | CALPTSRNSGN | 475 | TRAV6 | TRAJ29 | CASSSIWTSVN | 597 | TRBV5- | TRBJ2-1 |
| | TPLVF | | | | EQFF | | 6 | |
| TCR_61 | CAYSGTASKL | 476 | TRAV38- | TRAJ44 | CSVVDRGRFY | 598 | TRBV29- | TRBJ2-1 |
| | TF | | 2/DV8 | | NEQFF | | 1 | |
| TCR_62 | CAMRRPGANN | 477 | TRAV14/ | TRAJ36 | CASSAQEGRIE | 599 | TRBV4- | TRBJ1-1 |
| | LFF | | DV4 | | MNTEAFF | | 3 | |
| TCR_63 | CAVNRDDKIIF | 478 | TRAV12- | TRAJ30 | CASSPDIEQYF | 600 | TRBV7- | TRBJ2-7 |
| | | | 2 | | | | 9 | |
| TCR_64 | CAVNQAGTAL | 479 | TRAV22 | TRAJ15 | CASSIGLGGGY | 601 | TRBV19 | TRBJ1-2 |
| | IF | | | | TF | | | |
| TCR_65 | CAVIYSGNTPL | 480 | TRAV8-1 | TRAJ29 | CASSLGGAEAF | 602 | TRBV11- | TRBJ1-1 |
| | VF | | | | F | | 3 | |
| TCR_66 | CAALSGGGAD | 481 | TRAV21 | TRAJ45 | CASSEALSGGA | 603 | TRBV2 | TRBJ2-5 |
| | GLTF | | | | PAETQYF | | | |
| TCR_67 | CAVRDLGGQK | 482 | TRAV1-2 | TRAJ16 | CASSLGQGSPA | 604 | TRBV5- | TRBJ2-6 |
| | LLF | | | | GANVLTF | | 6 | |
| TCR_68 | CAVSTGTASK | 483 | TRAV13- | TRAJ44 | CATRGVGETQ | 605 | TRBV15 | TRBJ2-5 |
| | LTF | | 1 | | YF | | | |
| TCR_69 | CSKTSYDKVIF | 484 | TRAV13- | TRAJ50 | CASSVVDRNN | 606 | TRBV9 | TRBJ2-1 |
| | | | 1 | | EQFF | | | |
| TCR_70 | CVVNRGDGLT | 485 | TRAV12- | TRAJ45 | CSARDQQGQN | 607 | TRBV20- | TRBJ2-2 |
| | F | | 1 | | TGELFF | | 1 | |
| TCR_71 | CLVANNARLM | 486 | TRAV4 | TRAJ31 | CASSQDRDNL | 608 | TRBV5- | TRBJ1-1 |
| | F | | | | NTEAFF | | 4 | |
| TCR_72 | CAVYGGSQGN | 487 | TRAV1-2 | TRAJ42 | CASSESNYGYT | 609 | TRBV7- | TRBJ1-2 |
| | LIF | | | | F | | 2 | |
| TCR_73 | CAVNQAGTAL | 479 | TRAV12- | TRAJ15 | CASSLLGSNQE | 610 | TRBV7- | TRBJ2-5 |
| | IF | | 2 | | TQYF | | 2 | |
| TCR_74 | CAVRDLGGQK | 482 | TRAV1-2 | TRAJ16 | CASSLGQGSPA | 604 | TRBV5- | TRBJ2-6 |
| | LLF | | | | GANVLTF | | 6 | |
| TCR_75 | CAVNEGGGSY | 488 | TRAV12- | TRAJ6 | CASSLAMGTS | 611 | TRBV5- | TRBJ2-1 |
| | IPTF | | 2 | | GGPYNEQFF | | 1 | |
| TCR_76 | CAASNRGGSE | 489 | TRAV23/ | TRAJ57 | CASSYHAGDR | 612 | TRBV6- | TRBJ1-2 |
| | KLVF | | DV6 | | GFGYTF | | 5 | |
| TCR_77 | CAGNTGTASK | 490 | TRAV38- | TRAJ44 | CASSLWGGYT | 613 | TRBV5- | TRBJ1-1 |
| | LTF | | 2/DV8 | | EAFF | | 5 | |
| TCR_78 | CAAPTNNNDM | 491 | TRAV13- | TRAJ43 | CASSYVTGAS | 614 | TRBV6- | TRBJ2-7 |
| | RF | | 1 | | YEQYF | | 2 | |
| TCR_79 | CAERTALGYS | 492 | TRAV5 | TRAJ11 | CASSTTGGEEQ | 615 | TRBV18 | TRBJ2-1 |
| | TLTF | | | | FF | | | |
| TCR_80 | CADDYKLSF | 493 | TRAV13- | TRAJ20 | CASKKTPVGIE | 616 | TRBV19 | TRBJ1-1 |
| | | | 1 | | AFF | | | |
| TCR_81 | CVVNDPAGSY | 494 | TRAV12- | TRAJ28 | CASSPPSGGNT | 617 | TRBV3- | TRBJ2-2 |
| | QLTF | | 1 | | GELFF | | 1 | |
| TCR_82 | CAERGGGFKTI | 495 | TRAV5 | TRAJ9 | CASSSRTAPSD | 618 | TRBV5- | TRBJ2-3 |
| | F | | | | TQYF | | 1 | |
| TCR_83 | CAVEGNYGGS | 496 | TRAV2 | TRAJ42 | CASSINPSSYN | 619 | TRBV19 | TRBJ2-1 |
| | QGNLIF | | | | EQFF | | | |
| TCR_84 | CALTGNTGGF | 497 | TRAV19 | TRAJ9 | CASSLDSSLGY | 620 | TRBV11- | TRBJ1-2 |
| | KTIF | | | | GYTF | | 2 | |
| TCR_85 | CAESKEGKLIF | 498 | TRAV5 | TRAJ37 | CAYQPPGGGNI | 621 | TRBV30 | TRBJ2-4 |
| | | | | | QYF | | | |
| TCR_86 | CVVNMGRGYS | 499 | TRAV12- | TRAJ11 | CASSPVAGGN | 622 | TRBV5- | TRBJ2-2 |
| | TLTF | | 1 | | TGELFF | | 6 | |
| TCR_87 | CAMTWGGTSY | 500 | TRAV12- | TRAJ52 | CSAIEEGTEVF | 623 | TRBV20- | TRBJ1-2 |
| | GKLTF | | 3 | | GYTF | | 1 | |
| TCR_88 | CVVNQYNDM | 501 | TRAV12- | TRAJ43 | CASFQDQNTG | 624 | TRBV12- | TRBJ2-2 |
| | RF | | 1 | | ELFF | | 3 | |
| TCR_89 | CAVIGGSSNTG | 502 | TRAV21 | TRAJ37 | CASSLAGAQQ | 625 | TRBV5- | TRBJ1-1 |
| | KLIF | | | | AFF | | 1 | |
| TCR_90 | CVVNNAGNM | 503 | TRAV12- | TRAJ39 | CATQNLNTGE | 626 | TRBV15 | TRBJ2-2 |
| | LTF | | 1 | | LFF | | | |
| TCR_91 | CALSYSDGQK | 504 | TRAV16 | TRAJ16 | CASSLAGGWG | 627 | TRBV5- | TRBJ1-1 |
| | LLF | | | | TEAFF | | 1 | |
| TCR_92 | CAMSANAGN | 505 | TRAV12- | TRAJ39 | CASRPLTGGPL | 628 | TRBV27 | TRBJ2-4 |
| | MLTF | | 3 | | AKNIQYF | | | |
| TCR_93 | CALDYGQNFV | 506 | TRAV24 | TRAJ26 | CASSIGSREAFF | 629 | TRBV19 | TRBJ1-1 |
| | F | | | | | | | |
| TCR_94 | CVVNNNNDM | 507 | TRAV12- | TRAJ43 | CATTDLDSGEL | 630 | TRBV15 | TRBJ2-2 |
| | RF | | 1 | | FF | | | |
| TCR_95 | CAAPMTTDSW | 508 | TRAV20 | TRAJ24 | CASSSAARTGN | 631 | TRBV5- | TRBJ2-1 |
| | GKLQF | | | | EQFF | | 1 | |
| TCR_96 | CAERTALGYS | 492 | TRAV4 | TRAJ11 | CASSTTGGEEQ | 615 | TRBV18 | TRBJ2-1 |
| | TLTF | | | | FF | | | |
| TCR_97 | CALSLIIYNQG | 509 | TRAV19 | TRAJ23 | CASSPTSGSRE | 632 | TRBV6- | TRBJ2-5 |
| | GKLIF | | | | TQYF | | 2 | |
| TCR_98 | CVVNYDTDKL | 510 | TRAV12- | TRAJ34 | CATGGLNTGE | 633 | TRBV2 | TRBJ2-2 |
| | IF | | 1 | | LFF | | | |
| TCR_99 | CVVNEEDKLIF | 511 | TRAV12- | TRAJ34 | CAGSTSLTGEL | 634 | TRBV7- | TRBJ2-2 |
| | | | 1 | | FF | | 9 | |
| TCR_100 | CAFTNYNQGG | 512 | TRAV24 | TRAJ23 | CASSPAGGAV | 635 | TRBV5- | TRBJ1-1 |
| | KLIF | | | | LQAFF | | 6 | |
| TCR_101 | CAVHLNDYKL | 513 | TRAV20 | TRAJ20 | CASSRPSGQGN | 636 | TRBV18 | TRBJ1-2 |
| | SF | | | | NGYTF | | | |
| TCR_102 | CVVNRDTGNQ | 514 | TRAV12- | TRAJ49 | CAWLRDMNT | 637 | TRBV30 | TRBJ2-2 |
| | FYF | | 1 | | GELFF | | | |
| TCR_103 | CVVNRDNDM | 515 | TRAV12- | TRAJ43 | CASMDLNTGE | 638 | TRBV19 | TRBJ2-2 |
| | RF | | 1 | | LFF | | | |
| TCR_104 | CLVGAESGGY | 516 | TRAV4 | TRAJ4 | CASSQGDYRSS | 639 | TRBV14 | TRBJ2-7 |
| | NKLIF | | | | TYEQYF | | | |
| TCR_105 | CAFPRGGSNY | 517 | TRAV24 | TRAJ53 | CSARDVVSGG | 640 | TRBV20- | TRBJ2-7 |
| | KLTF | | | | HYEQYF | | 1 | |
| TCR_106 | CAVNRDDKIIF | 478 | TRAV12- | TRAJ30 | CASSPDIEQFF | 641 | TRBV7- | TRBJ2-1 |
| | | | 2 | | | | 9 | |
| TCR_107 | CAARYSGNTP | 518 | TRAV29/ | TRAJ29 | CASSTGSNTGE | 642 | TRBV12- | TRBJ2-2 |
| | LVF | | DV5 | | LFF | | 4 | |
| TCR_108 | CVVNGNNDM | 519 | TRAV12- | TRAJ43 | CARQDSNTGE | 643 | TRBV12- | TRBJ2-2 |
| | RF | | 1 | | LFF | | 3 | |
| TCR_109 | CAMRDSNSNS | 520 | TRAV14/ | TRAJ41 | CASSDGHQGL | 644 | TRBV10- | TRBJ2-5 |
| | GYALNF | | DV4 | | QETQYF | | 1 | |
| TCR_110 | CAASQISDGQK | 521 | TRAV23/ | TRAJ16 | CASSYQPGVA | 645 | TRBV6- | TRBJ1-4 |
| | LLF | | DV6 | | TNEKLFF | | 5 | |
| TCR_111 | CAFPSGGSNY | 446 | TRAV24 | TRAJ53 | CASSETGSSSY | 646 | TRBV6- | TRBJ2-7 |
| | KLTF | | | | EQYF | | 1 | |
| TCR_112 | CAENARLMF | 522 | TRAV13- | TRAJ31 | CASSSKGGGQ | 548 | TRBV7- | TRBJ2-5 |
| | | | 2 | | QTQYF | | 2 | |
| TCR_113 | CAVRGADNAR | 523 | TRAV1-2 | TRAJ31 | CASSSVSLGNE | 647 | TRBV6- | TRBJ2-1 |
| | LMF | | | | QFF | | 5 | |
| TCR_114 | CALMDSSYKLI | 524 | TRAV16 | TRAJ12 | CASSLEMQGA | 648 | TRBV5- | TRBJ1-2 |
| | F | | | | LYGYTF | | 1 | |
| TCR_115 | CAAMNNTNA | 525 | TRAV23/ | TRAJ27 | CASSLFSSGQG | 649 | TRBV7- | TRBJ1-2 |
| | GKSTF | | DV6 | | NGYTF | | 2 | |
| TCR_116 | CAMREGVIYN | 526 | TRAV14/ | TRAJ23 | CAWSRGSAYN | 650 | TRBV30 | TRBJ2-1 |
| | QGGKLIF | | DV4 | | EQFF | | | |
| TCR_117 | CAVLGGDKIIF | 527 | TRAV12- | TRAJ30 | CASSESNYGYT | 609 | TRBV7- | TRBJ1-2 |
| | | | 2 | | F | | 2 | |
| TCR_118 | CAEVGSQGNLI | 528 | TRAV5 | TRAJ42 | CASSYYPSASG | 651 | TRBV6- | TRBJ2-5 |
| | F | | | | RADETQYF | | 6 | |
| TCR_119 | CAMSQMDSSY | 529 | TRAV14/ | TRAJ12 | CSAPGTGYNE | 652 | TRBV29- | TRBJ2-1 |
| | KLIF | | DV4 | | QFF | | 1 | |
| TCR_120 | CAMRGLQGGK | 530 | TRAV14/ | TRAJ23 | CASSYQPGVA | 645 | TRBV6- | TRBJ1-4 |
| | LIF | | DV4 | | TNEKLFF | | 5 | |
| TCR_121 | CASGNTPLVF | 531 | TRAV12- | TRAJ29 | CASSETGSSSY | 646 | TRBV6- | TRBJ2-7 |
| | | | 2 | | EQYF | | 1 | |
| TCR_122 | CAVQAPMSAR | 427 | TRAV20 | TRAJ42 | CASSSKGGGQ | 548 | TRBV7- | TRBJ2-5 |
| | GSQGNLIF | | | | QTQYF | | 2 | |
| TCR_123 | CVVNGYNTDK | 532 | TRAV12- | TRAJ34 | CASSSVSLGNE | 647 | TRBV6- | TRBJ2-1 |
| | LIF | | 1 | | QFF | | 5 | |
| TCR_124 | CAMSPNNAGN | 533 | TRAV14/ | TRAJ39 | CASSLEMQGA | 648 | TRBV5- | TRBJ1-2 |
| | MLTV | | DV4 | | LYGYTF | | 1 | |
| TCR_125 | CALNQDRGST | 534 | TRAV9-2 | TRAJ18 | CASSLFSSGQG | 649 | TRBV7- | TRBJ1-2 |
| | LGRLYF | | | | NGYTF | | 2 | |
| TCR_126 | CAYKENYKYI | 535 | TRAV38- | TRAJ40 | CAWSRGSAYN | 650 | TRV30 | TRBJ2-1 |
| | F | | 2/D V8 | | EQFF | | | |
| TCR_127 | CAVYGGSQGN | 487 | TRAV1-2 | TRAJ42 | CASSESNYGYT | 609 | TRBV7- | TRBJ1-2 |
| | LIF | | | | F | | 2 | |
| TCR_128 | CAMSASPNDM | 536 | TRAV12- | TRAJ43 | CASSYYPSASG | 651 | TRBV6- | TRBJ2-5 |
| | RF | | 3 | | RADETQYF | | 6 | |
| TCR_ 129 | CAVNAPSSAS | 537 | TRAV8-1 | TRAJ3 | CSAPGTGYNE | 652 | TRBV29- | TRBJ2-1 |
| | KIIF | | | | QFF | | 1 | |
| TCR_130 | CAVSLNNAGN | 682 | | | CASSQETAGV | 685 | | |
| | MLTF* | | | | NEQFF* | | | |
| TCR_131 | CATDTGRRAL | 683 | | | CASSLGQGDTE | 686 | | |
| | TF* | | | | AFF* | | | |
| TCR_132 | CGTWEDQGAQ | 684 | | | CASSLAQGPY | 687 | | |
| | KLVF* | | | | NEQFF* | | | |

*TCRs identified in Example 21

TABLE 6

| SEQ ID NO: | TCR_ID chain |
|---|---|
| 1111 | TCR_1Alpha chain |
| 1112 | TCR_2Alpha chain |
| 1113 | TCR_3Alpha chain |
| 1114 | TCR_4Alpha chain |
| 1115 | TCR_5Alpha chain |
| 1116 | TCR_6Alpha chain |
| 1117 | TCR_7Alpha chain |
| 1118 | TCR_8Alpha chain |
| 1119 | TCR_9Alpha chain |
| 1120 | TCR_10Alpha chain |
| 1121 | TCR_11Alpha chain |
| 1122 | TCR_12Alpha chain |
| 1123 | TCR_13Alpha chain |
| 1124 | TCR_14Alpha chain |
| 1125 | TCR_15Alpha chain |
| 1126 | TCR_16Alpha chain |
| 1127 | TCR_17Alpha chain |
| 1128 | TCR_18Alpha chain |
| 1129 | TCR_19Alpha chain |
| 1130 | TCR_20Alpha chain |
| 1131 | TCR_21Alpha chain |
| 1132 | TCR_22Alpha chain |
| 1133 | TCR_23Alpha chain |
| 1134 | TCR_24Alpha chain |
| 1135 | TCR_25Alpha chain |
| 1136 | TCR_26Alpha chain |
| 1137 | TCR_27Alpha chain |
| 1138 | TCR_28Alpha chain |
| 1139 | TCR_29Alpha chain |
| 1140 | TCR_30Alpha chain |
| 1141 | TCR_31Alpha chain |
| 1142 | TCR_32Alpha chain |
| 1143 | TCR_33Alpha chain |
| 1144 | TCR_34Alpha chain |
| 1145 | TCR_35Alpha chain |
| 1146 | TCR_36Alpha chain |
| 1147 | TCR_37Alpha chain |
| 1148 | TCR_38Alpha chain |
| 1149 | TCR_39Alpha chain |
| 1150 | TCR_40Alpha chain |
| 1151 | TCR_41Alpha chain |
| 1152 | TCR_42Alpha chain |
| 1153 | TCR_43Alpha chain |
| 1154 | TCR_44Alpha chain |
| 1155 | TCR_45Alpha chain |
| 1156 | TCR_46Alpha chain |
| 1157 | TCR_47Alpha chain |
| 1158 | TCR_48Alpha chain |
| 1159 | TCR_49Alpha chain |
| 1160 | TCR_50Alpha chain |
| 1161 | TCR_51Alpha chain |
| 1162 | TCR_52Alpha chain |
| 1163 | TCR_53Alpha chain |
| 1164 | TCR_54Alpha chain |
| 1165 | TCR_55Alpha chain |
| 1166 | TCR_56Alpha chain |
| 1167 | TCR_57Alpha chain |
| 1168 | TCR_58Alpha chain |
| 1169 | TCR_59Alpha chain |
| 1170 | TCR_60Alpha chain |
| 1171 | TCR_61Alpha chain |
| 1172 | TCR_62Alpha chain |
| 1173 | TCR_63Alpha chain |
| 1174 | TCR_64Alpha chain |
| 1175 | TCR_65Alpha chain |
| 1176 | TCR_66Alpha chain |
| 1177 | TCR_67Alpha chain |
| 1178 | TCR_68Alpha chain |
| 1179 | TCR_69Alpha chain |
| 1180 | TCR_70Alpha chain |
| 1181 | TCR_71Alpha chain |
| 1182 | TCR_72Alpha chain |
| 1183 | TCR_73Alpha chain |
| 1184 | TCR_74Alpha chain |
| 1185 | TCR_75Alpha chain |
| 1186 | TCR_76Alpha chain |
| 1187 | TCR_77Alpha chain |
| 1188 | TCR_78Alpha chain |
| 1189 | TCR_79Alpha chain |
| 1190 | TCR_80Alpha chain |
| 1191 | TCR_81Alpha chain |
| 1192 | TCR_82Alpha chain |
| 1193 | TCR_83Alpha chain |
| 1194 | TCR_84Alpha chain |
| 1195 | TCR_85Alpha chain |
| 1196 | TCR_86Alpha chain |
| 1197 | TCR_87Alpha chain |
| 1198 | TCR_88Alpha chain |
| 1199 | TCR_89Alpha chain |
| 1200 | TCR_90Alpha chain |
| 1201 | TCR_91Alpha chain |
| 1202 | TCR_92Alpha chain |
| 1203 | TCR_93Alpha chain |
| 1204 | TCR_94Alpha chain |
| 1205 | TCR_95Alpha chain |
| 1206 | TCR_96Alpha chain |
| 1207 | TCR_97Alpha chain |
| 1208 | TCR_98Alpha chain |
| 1209 | TCR_99Alpha chain |
| 1210 | TCR_100Alpha chain |
| 1211 | TCR_101Alpha chain |
| 1212 | TCR_102Alpha chain |
| 1213 | TCR_103Alpha chain |
| 1214 | TCR_104Alpha chain |
| 1215 | TCR_105Alpha chain |
| 1216 | TCR_106Alpha chain |
| 1217 | TCR_107Alpha chain |
| 1218 | TCR_108Alpha chain |
| 1219 | TCR_1Beta chain |
| 1220 | TCR_2Beta chain |
| 1221 | TCR_3Beta chain |
| 1222 | TCR_4Beta chain |
| 1223 | TCR_5Beta chain |
| 1224 | TCR_6Beta chain |
| 1225 | TCR_7Beta chain |
| 1226 | TCR_8Beta chain |
| 1227 | TCR_9Beta chain |
| 1228 | TCR_10Beta chain |
| 1229 | TCR_11Beta chain |
| 1230 | TCR_12Beta chain |
| 1231 | TCR_13Beta chain |
| 1232 | TCR_14Beta chain |
| 1233 | TCR_15Beta chain |
| 1234 | TCR_16Beta chain |
| 1235 | TCR_17Beta chain |
| 1236 | TCR_18Beta chain |
| 1237 | TCR_19Beta chain |
| 1238 | TCR_20Beta chain |
| 1239 | TCR_21Beta chain |
| 1240 | TCR_22Beta chain |
| 1241 | TCR_23Beta chain |
| 1242 | TCR_24Beta chain |
| 1243 | TCR_25Beta chain |
| 1244 | TCR_26Beta chain |
| 1245 | TCR_27Beta chain |
| 1246 | TCR_28Beta chain |
| 1247 | TCR_29Beta chain |
| 1248 | TCR_30Beta chain |
| 1249 | TCR_31Beta chain |
| 1250 | TCR_32Beta chain |
| 1251 | TCR_33Beta chain |
| 1252 | TCR_34Beta chain |
| 1253 | TCR_35Beta chain |
| 1254 | TCR_36Beta chain |
| 1255 | TCR_37Beta chain |
| 1256 | TCR_38Beta chain |
| 1257 | TCR_39Beta chain |
| 1258 | TCR_40Beta chain |
| 1259 | TCR_41Beta chain |
| 1260 | TCR_42Beta chain |
| 1261 | TCR_43Beta chain |
| 1262 | TCR_44Beta chain |
| 1263 | TCR_45Beta chain |
| 1264 | TCR_46Beta chain |
| 1265 | TCR_47Beta chain |
| 1266 | TCR_48Beta chain |
| 1267 | TCR_49Beta chain |
| 1268 | TCR_50Beta chain |
| 1269 | TCR_51Beta chain |
| 1270 | TCR_52Beta chain |
| 1271 | TCR_53Beta chain |
| 1272 | TCR_54Beta chain |
| 1273 | TCR_55Beta chain |
| 1274 | TCR_56Beta chain |
| 1275 | TCR_57Beta chain |
| 1276 | TCR_58Beta chain |
| 1277 | TCR_59Beta chain |
| 1278 | TCR_60Beta chain |
| 1279 | TCR_61Beta chain |
| 1280 | TCR_62Beta chain |
| 1281 | TCR_63Beta chain |
| 1282 | TCR_64Beta chain |
| 1283 | TCR_65Beta chain |
| 1284 | TCR_66Beta chain |
| 1285 | TCR_67Beta chain |
| 1286 | TCR_68Beta chain |
| 1287 | TCR_69Beta chain |
| 1288 | TCR_70Beta chain |
| 1289 | TCR_71Beta chain |
| 1290 | TCR_72Beta chain |
| 1291 | TCR_73Beta chain |
| 1292 | TCR_74Beta chain |
| 1293 | TCR_75Beta chain |
| 1294 | TCR_76Beta chain |
| 1295 | TCR_77Beta chain |
| 1296 | TCR_78Beta chain |
| 1297 | TCR_79Beta chain |
| 1298 | TCR_80Beta chain |
| 1299 | TCR_81Beta chain |
| 1300 | TCR_82Beta chain |
| 1301 | TCR_83Beta chain |
| 1302 | TCR_84Beta chain |
| 1303 | TCR_85Beta chain |
| 1304 | TCR_86Beta chain |
| 1305 | TCR_87Beta chain |
| 1306 | TCR_88Beta chain |
| 1307 | TCR_89Beta chain |
| 1308 | TCR_90Beta chain |
| 1309 | TCR_91Beta chain |
| 1310 | TCR_92Beta chain |
| 1311 | TCR_93Beta chain |
| 1312 | TCR_94Beta chain |
| 1313 | TCR_95Beta chain |
| 1314 | TCR_96Beta chain |
| 1315 | TCR_97Beta chain |
| 1316 | TCR_98Beta chain |
| 1317 | TCR_99Beta chain |
| 1318 | TCR_100Beta chain |
| 1319 | TCR_101Beta chain |
| 1320 | TCR_102Beta chain |
| 1321 | TCR_103Beta chain |
| 1322 | TCR_104Beta chain |
| 1323 | TCR_105Beta chain |
| 1324 | TCR_106Beta chain |
| 1325 | TCR_107Beta chain |
| 1326 | TCR_108Beta chain |

[0187] In TABLES 1-6, when a given column refers to a particular TCR, e.g., TCR_1, the terminology is used consistently throughout the various tables. As a result, the TCR designated as TCR_1 in TABLE 1, is the same TCR that appears in TABLES 5 and 6. Furthermore, in the context of an engineered T cell receptor having an alpha chain and a beta chain, wherein the TCR comprises corresponding CDR3 alpha and CDR3 beta sequences set forth, e.g., in TABLE 5, it is understood that the two CDR3 sequences belong to the same TCR, e.g., TCR_1. Furthermore, in the context of an engineered TCR further comprising CDR1 alpha and CDR2 alpha sequences defined by the corresponding alpha V gene, it is understood that the CDR1 and CDR2 sequences are encoded by the same V gene, e.g., for TCR_1, and belong to the same TCR as the CDR3 sequence, e.g., TCR_1. The CDR1 and CDR2 sequences can be determined by methods known in the art based on the sequence of the V gene (see, e.g., Gowthaman and Pierce, Nucleic Acids Res. (2018) 46: W396-W401). As a result, in a given row in, e.g., TABLES 1, 5 and 6, a particular TCR can have, as the relevant context dictates, the features, e.g., CDR 3 amino acid sequence, or is encoded by specified V and J gene sequences in that row of the table. For example, a soluble TCR does not necessarily have all the domains and functionality as an entire, membrane bound TCR.

[0188] Also provided herein are SARS-CoV-2 T cell epitopes comprising amino acid sequences SEQ ID NOs: 271-310 and 313-326, and combinations thereof. In certain embodiments, the T cell epitope comprises an amino acid sequence selected from SEQ ID NOs: 286-310 and 313-326. In certain embodiments, a plurality of T cell epitopes comprise amino acid sequences selected from SEQ ID NOs: 286-310 and 313-326, and combinations thereof.

[0189] Also contemplated are variants of the T cell epitopes, for example, a peptide comprising an amino acid sequence that differs by 1, 2, or 3 amino acids relative to a T cell epitope disclosed herein. Such variants can be derived from, for example, mutant SARS-CoV-2 strains that arise in the human population over time. It is understood, according to scientific literature and databases (Rammensee et al., 1999; Godkin et al., 1997), that certain positions of T cell epitopes are typically anchor residues forming a core sequence fitting to the binding groove of the MHC. Thus, a skilled person in the art would be able to modify the amino acid sequences of the T cell epitopes disclosed herein, by maintaining the known anchor residues, and determine whether such variants maintain the ability to bind the MHC. The T cell epitopes disclosed herein including the variants, as well as peptides (e.g., isolated peptides) comprising such epitopes, are useful for stimulating T cell immune responses in vitro, ex vivo, or in vivo.

[0190] In certain embodiments, the epitope is an MHC Class I-restricted T cell epitope. In certain embodiment, the epitope, when complexed with a cognate MHC Class I, is capable of activating CD8⁺ T cells. In certain embodiments, the epitope is an MHC Class II-restricted T cell epitope. In certain embodiments, the epitope, when complexed with a cognate MHC Class II, is capable of activating CD4⁺ T cells. In certain embodiments, the epitope can bind an MHC Class I and an MHC Class II and, when complexed with the cognate MHCs, is capable of activating CD8⁺ and CD4⁺ T cells, respectively. In one embodiment, the epitope is derived from a SARS-CoV-2 antigen, e.g., selected from the group consisting of ORF1AB, Spike protein, N protein, M protein, 3A protein and E protein. In one embodiment, the epitope is derived from a SARS-CoV-2 antigen selected from the group consisting of a protein encoded by a non-canonical ORF described by Finkel et al. (2020) Nature 589:125-130, including, for example, 1a.uORF1.ext, 1a.uORF1, 1a.uORF2.ext, 1a.uORF2, 1a.iORF, S.iORF1, S.iORF2, 3a.iORF1 (ORF3c), 3a.iORF2, E.iORF, M.ext, M.iORF, 6.iORF, 7a.iORF1, 7a.iORF2, 7a.iORF3, 7b.iORF1, 7b.iORF2, 8.iORF, N.iORF1 (ORF9b), N.iORF2, 10.uORF, and 10.iORF.

[0191] In certain embodiments, the epitope is a crossreacting epitope that is homologous across two or more coronavirus members, e.g., SARS-CoV-2 and at least one additional coronavirus, such as SARS-CoV-1, HCoV-OC43, HCoV-HKU1, HCoV-229E and/or HCoV-NL63. Certain subjects not exposed to COVID-19 have been found to have T cells reactive to SARS-CoV-2 antigens, implying crossreactivity from exposure to an endemic coronavirus (see e.g., Example 20 and Example 22). Moreover, crossreactive memory T cells are implicated in playing a role in herd immunity to SARS-CoV-2 (Lipsitch et al. (2020) Nature Reviews, published Oct. 6, 2020). Accordingly, in one embodiment, the disclosure provides a SARS-CoV-2 T cell epitope that is recognized by T cells from COVID-19 T patients as well as T cells from nonexposed subjects, i.e., a cross-reactive epitope that is homologous across at least two or more coronavirus members. Epitope homology for T cell epitopes across various coronavirus sequences can be determined using the Hamming Distance between the sequences being compared (see e.g. FIG. 33). For example, the Hamming Distance value of the epitope for SARS-CoV-2 is set as 0 and then a “homologous” epitope across another coronavirus is a sequence with a Hamming Distance value of 2 or less, more preferably 1 or less, most preferably 0. As described herein in Example 20 and Example 22, a T cell epitope derived from the SARS-CoV-2 N protein (SPRWYFYYL; SEQ ID NO: 323) has been identified whose sequence is homologous (Hamming Distance of 2 or less) in SARS-CoV-1, HCoV-HKU1 and HCoV-OC43. This T cell epitope was recognized by T cells from 100% of the COVID-19 convalescent patients tested, as well as by T cells from almost half of the non-exposed subjects.

[0192] It is understood that a peptide comprising a T cell epitope is useful in stimulating a T cell immune response. Where the peptide consists of the T cell epitope sequence, the peptide can be loaded directly on the surface of an APC to form a complex with an MHC (e.g., MHC Class I). Where the peptide includes additional amino acids on the N-terminus and/or C-terminus of the T cell epitope, the peptide can be expressed or delivered in an antigen-presenting cell (APC) and be processed by the APC to present the epitope on the cell surface. Accordingly, the peptides useful in the present invention comprise the epitope sequences disclosed herein and may be greater in length. In certain embodiments, the peptide is no more than 100 amino acids in length, for example, no more than 90 amino acids, no more than 80 amino acids, no more than 70 amino acids, no more than 60 amino acids, no more than 50 amino acids, no more than 40 amino acids, no more than 35 amino acids, no more than 30 amino acids, no more than 25 amino acids, no more than 20 amino acids, no more than 19 amino acids, no more than 18 amino acids, no more than 17 amino acids, no more than 16 amino acids, no more than 15 amino acids, no more than 14 amino acids, no more than 13 amino acids, no more than 12 amino acids, no more than 11 amino acids, or no more than 10 amino acids in length. In certain embodiments, where the epitope in the peptide is expected to bind MHC Class I, the peptide is no more than 10 amino acids in length. In certain embodiments, where the epitope in the peptide is expected to bind MHC Class II, the peptide is no more than 25 amino acids in length. In certain embodiments, the amino acid sequence of the peptide consists of the amino acid sequence of the corresponding T cell epitope.

[0193] In certain embodiments, a peptide of the present invention comprises two or more T cell epitopes, e.g., two or more of the T cell epitopes disclosed herein. In certain embodiments, the two or more T cell epitopes are partially overlapping, and the peptide comprises the entire amino acid sequence of the two or more T cell epitopes aligned. In certain embodiments, the two or more T cell epitopes are incorporated in a hotspot region.

[0194] In certain embodiments, the peptide further comprises a moiety (e.g., an amino acid sequence) that improves one or more characteristics of the T cell epitope or its manufacture or function. For example, in certain embodiments, the peptide further comprises an amino acid sequence that facilitates delivery of the T cell epitope into APCs. In certain embodiments, the peptide further comprises a moiety (e.g., an antibody or an antigen-binding fragment thereof) that specifically targets an APC. In certain embodiments, the peptide further comprises a moiety that improves stability and/or binding to an MHC to elicit a stronger immune response. In certain embodiments, the peptide comprises a cell penetrating peptide, which facilitates cell uptake in a manner that does not require a cell membrane protein. In certain embodiments, the peptide is modified, for example, to mimic the post-translational modification of the corresponding SARS-CoV-2 protein when expressed in the APC.

[0195] In certain embodiments, the peptide binds an MHC to form a complex. The ability of a peptide to bind an MHC can be assessed by various assays known in the art or described herein, such as by analysis of MHC-eluted peptides by liquid chromatography with tandem mass spectrometry (LC-MS/MS) and in silico prediction algorithms (see, e.g., Sofron et al. (2016) Eur. J. Immunol. 46:319-328), fluorescence polarization assays (see, e.g., Yin et al. (2014) Curr. Protoc. Immunol. 106:5.10.1-5.10.12), ELISA (see, e.g., Sylvester-Hvid et al., (2002) Tissue Antigens, 59:251-58), UV-mediated peptide exchange (see, e.g., Rodenko et al., Nat. Protoc. (2006) 1(3):1120-32), LC/MS (see, e.g., Obermair et al. (2021) bioRxiv posted Mar. 4, 2021 under doi.org/10.1101/2021.03.02.43352), or using a chimeric MHC/TcR system described in Section III below.

[0196] As described in Example 19, starting from a published TCR sequence from a T cell obtained from an acute COVID-19 patient, a 20-mer epitope having the sequence RGHLRIAGHEILGRCDIKDLP (SEQ ID NO: 306) has been identified that is an MHC Class II-restricted CD4 T cell epitope derived from the SARS-CoV-2 membrane glycoprotein (M protein). Analysis of this epitope revealed it was displayed across multiple human MHC Class II alleles, including DRB1*11:01, DRB1*07:01, DRB1*04:04, DRB1*15:01 and DRB1*10:01 (shown in FIG. 32). Patient T cells also showed reactivity to longer peptides that contained the 20-mer sequence, including the 23-mers having the amino acid sequences shown in in SEQ ID NOs: 307-310. Accordingly, in certain embodiments, the SARS-CoV-2 T cell epitope is a peptide having the amino acid sequence set forth in in SEQ ID NOs: 307-310. In certain embodiments, the peptide of the present invention is 20-30 amino acids in length, or 20-25 amino acids in length, or 20-23 amino acids in length, comprising the amino acid sequence shown in SEQ ID NO: 306. In various embodiments, the peptide is a 20mer, a 21mer, a 22mer, a 23mer, a 24mer, a 25mer, a 26mer, a 27mer, a 28mer, a 29mer or a 30mer comprising the amino acid sequence of SEQ ID NO: 306.

[0197] As described in Example 20, screening of peptide-MHC tetramers loaded with 9-mer epitope libraries led to the identification of 20 high confidence MHC Class I epitopes with reactivity against T cells from convalescent COVID-19 patients, and for certain epitopes reactivity against T cells from unexposed patients as well. These 20 MHC Class I epitopes (shown in TABLE 8) have the amino acid sequences shown in SEQ ID NOs: 286-289, 294, 297 and 313-326. Epitopes having the sequences of SEQ ID NOs: 286-289, 294, 297 and 313-315 bind HLA-A*02:01. Epitopes having the sequences of SEQ ID NOs: 316-322 bind HLA-A*24:02. Epitopes having the sequences of SEQ ID NOs: 323-326 bind HLA-B*07:02. These epitopes are derived from six different SARS-CoV-2 antigens: ORF1AB (SEQ ID NOs: 287, 289, 297, 314-317, 319 and 326), Spike protein (SEQ ID NOs: 288, 318, 320 and 322), N protein (SEQ ID NOs: 323-325), M protein (SEQ ID NO: 294), 3A protein (SEQ ID NOs: 286 and 321) and E protein (SEQ ID NO: 313). Notably the experiments revealed that a handful of dominant epitopes are emerging and the most reactive epitopes may have assistance by endemic coronavirus, given the level of reactivity to certain epitopes observed in unexposed patient samples. In particular, the N protein-derived, B*07:02-restricted epitope SPRWYFYYL (SEQ ID NO: 323) showed reactivity with all convalescent patient samples tested and almost half of unexposed patients, indicating it is a dominant T cell epitope.

[0198] Accordingly, in certain embodiments, the SARS-CoV-2 T cell epitope is a peptide having the amino acid sequence shown in any of SEQ ID NOs: 286-289, 294, 297 and 313-326. In certain embodiments, the SARS-CoV-2 T cell epitope is a peptide having the amino acid sequence shown in any of SEQ ID NOs: 286-289, 294, 297 and 313-315. In certain embodiments, the SARS-CoV-2 T cell epitope is a peptide having the amino acid sequence shown in any of SEQ ID NOs: 316-322. In certain embodiments, the SARS-CoV-2 T cell epitope is a peptide having the amino acid sequence shown in any of SEQ ID NOs: 287, 289, 297, 314-317, 319 and 326. In certain embodiments, the SARS-CoV-2 T cell epitope is a peptide having the amino acid sequence shown in any of SEQ ID NOs: 288, 318, 320 and 322. In certain embodiments, the SARS-CoV-2 T cell epitope is a peptide having the amino acid sequence shown in any of SEQ ID NOs: 323-325. In certain embodiments, the SARS-CoV-2 T cell epitope is a peptide having the amino acid sequence shown in SEQ ID NO: 294. In certain embodiments, the SARS-CoV-2 T cell epitope is a peptide having the amino acid sequence shown in SEQ ID NO: 286 or 321. In certain embodiments, the SARS-CoV-2 T cell epitope is a peptide having the amino acid sequence shown in SEQ ID NO: 313. In certain embodiments, the SARS-CoV-2 T cell epitope is a peptide having the amino acid sequence shown in SEQ ID NO: 323.

[0199] In certain embodiments, a peptide disclosed herein that comprises a T cell epitope binds a cognate MHC corresponding to the T cell epitope. In certain embodiments, the complex of the peptide and the cognate MHC is capable of stimulating a T cell immune response. For example, where the cognate MHC is a Class I MHC (e.g., HLA-A, HLA-B, or HLA-C), the complex is capable of stimulating a CD8⁺ T cell immune response, such as proliferation, activation, and/or memory formation of CD8⁺ T cells. Where the cognate MHC is a Class II MHC (e.g., HLA-DP, HLA-DQ, or HLA-DR), the complex is capable of stimulating a CD4+ T cell immune response, such as proliferation, activation, and/or memory formation of CD4⁺ T cells. Such complex can be presented as a soluble complex, immortalized on a solid surface (e.g., beads or nanoparticles), or presented on the surface of an APC. Clonal T cell proliferation can be assessed by methods known in the art such as carboxyfluorescein succinimidyl ester (CFSE) dilution assay. T cell activation can be assessed by methods known in the art such as staining for cell surface markers (e.g., upregulation of CD69, CD27, CD137, CD154 or downregulation of CD62L or CCR7) or cytokines (e.g., IFNγ or TNFα) and quantifying secretion of cytokine proteins (e.g., IFNγ or TNFα). Memory T cell formation can be assessed by methods known in the art such as staining for cell surface markers (e.g., CD45RO).

[0200] The SARS-CoV-2 T cell epitopes and the peptide comprising such epitopes disclosed herein can be used to stimulate a T cell immune response in vitro, ex vivo, or in vivo. Accordingly, the disclosure provides a method of stimulating a T cell immune response to SARS-CoV-2, or a cell infected thereby, by contacting a population of T cells with a T cell epitope presented by an MHC to permit activation of one or more T cells in the population for reactivity to a SARS-CoV-2 infected cell.

[0201] In certain embodiments, the T cell immune response can stimulated in vitro or ex vivo. A T cell epitope can be presented by an MHC in vitro or ex vivo by forming a complex, such as a complex immobilized on a solid surface (e.g., beads or nanoparticles) or presented on the surface of an APC. In certain embodiments, the disclosure provides a method of producing activated T cells, the method comprising contacting a population of T cells in vitro with the complex or APC to permit activation of one or more T cells in the population for reactivity to a SARS-CoV-2 infected cell. In certain embodiments, where the epitope-MHC complex is a class I complex, the one or more T cells in the population activated by this method are CD8⁺ T cells. In certain embodiments, where the epitope-MHC complex is a class II complex, the one or more T cells in the population activated by this method are CD4⁺ T cells. The method may optionally further comprise culturing the T cells to permit T cell amplification. Suitable conditions for T cell amplification include but are not limited to cell culture medium containing cytokines that support T cell survival and proliferation, such as IL-2 and IL-15. In certain embodiments, soluble anti-CD3 or anti-CD³/anti-CD28 beads are present in the culture media.

### IV. Peptide Libraries

[0202] In another embodiment, a composition of the disclosure is a SARS-CoV-2 T cell epitope library, e.g., a library comprising at least 100, at least 200, at least 300, at least 400 or at least 500 peptide moieties, wherein the peptide moieties within the library are included based on certain characteristics. For example, the library can comprise peptide moieties containing identified mutations in SARS-Co-V2 spike protein and optionally peptide moieties from at least one, and preferably multiple, of the following categories:
[0203] (a) 8mer-12mer peptides (e.g., 9mer peptides) of SARS-CoV-2 full proteome (e.g., peptide having an IC50, measure or predicted, of less than 500 nM for one or multiple MHC alleles);
[0204] (b) peptides of SARS-CoV comprising a sequence at least 90% (or at least 95%, 96%, 97%, 98% or 99%) identical to homologous SARS-CoV-2 sequences;
[0205] (c) peptides from common cold coronaviruses;
[0206] (d) peptides comprising immunodominant epitopes of SARS-CoV (e.g., identified from the Immune Epitope Database (IEDB);
[0207] (e) SARS-Co-V2 peptides with predicted glycosylation sites;
[0208] (f) peptide highly conserved across multiple coronavirus species or strains;
[0209] (g) peptides of non-structural proteins with low observed mutation rates;
[0210] (h) peptides against which T cell reactivity has been detected in abundance in patients with mild disease but not severe disease (e.g., patient that perished or required ventilation);
[0211] (i) peptides against which T cell reactivity has been detected in abundance in asymptomatic patients but not symptomatic patients; and
[0212] (j) peptides that show T cell reactivity with broad clonal diversity in recovered patients.

[0213] In other embodiments, the peptide library comprising peptide moieties from at least two, at least three, or at least four, or at least five, at least six, at least seven, at least eight, at least nine, at least ten or all eleven of the categories set forth in (a)-(j).

[0214] In another embodiment, the library include peptides that are predicted to load with IC50<500 nM across the top five, or top ten or top twenty Class I MHC alleles. In another embodiment, the peptide library can incorporate peptides from new viral strains that are shifting in prevalence within a population. In another embodiment, the peptide library can incorporate peptides that are altered by key mutations shown to alter viral function. In another embodiment, peptide can be specifically designed with respect to the MHC allele(s) to be used for peptide loading, e.g., peptides can be designed for a panel of five MHC alleles (e.g., five MCH Class I alleles).

[0215] A non-limiting example of a SARS-CoV-2 T cell epitope library is the 596-member library described in detail in Example 18 for MHC class I peptides or in TABLE 4 for MHC class II peptides.

[0216] In another embodiment, a composition of the disclosure is an MHC multimer library (e.g., MHC tetramer library). The MHC multimer library can comprise MHC multimers loaded with a SARS-CoV-2 T cell epitope library of the disclosure. In one embodiment, the MHC multimer library comprises MHC Class I multimers. Suitable MHC Class I alleles/sequences for preparation of multimers are described further below. In another embodiment, the MHC multimer library comprises MHC Class II multimers. Suitable MHC Class II alleles/sequences for preparation of multimers are described further below. Methods of preparing MHC multimers and loading them with a peptide epitope library are described further below. A non-limiting example of an MHC multimer library is MHC Class I tetramers loaded with the 596-member T cell epitope library described in detail in Example 18.

[0217] In one embodiment, the multimerization domain of the multimer is streptavidin or avidin. In one embodiment, the MHC multimer comprises four MHC monomers covalently conjugated to the streptavidin or avidin molecule at sites other than the biotin-binding site of streptavidin or avidin. In one embodiment, the four MHC monomers each comprise (i.e., are loaded with) a SARS-CoV-2 peptide, wherein each monomer comprises the same peptide. In one embodiment, the MHC multimer further comprises a biotinylated oligonucleotide barcode bound to the biotin-binding site of streptavidin or avidin.

[0218] In another embodiment, a composition of the disclosure is a kit for identifying a T cell reactive to a SARS-CoV-2 T cell epitope. The kit can comprise, for example an MHC multimer library of the disclosure (i.e., loaded with SARS-CoV-2 T cell epitope peptides) packaged with instructions for use of the library to identify a T cell reactive to a SARS-CoV-2 T cell epitope. Methods of using an MHC multimer library to identify T cells reactive to SARS-CoV-2 T cell epitopes are described further below.

[0219] In one embodiment, the kit comprises a plurality of MHC multimers. In one embodiment, the multimerization domain of each multimer is streptavidin or avidin. In one embodiment, each multimer comprises four MHC monomers covalently conjugated to the streptavidin or avidin molecule at sites other than the biotin-binding site of streptavidin or avidin. In one embodiment, the four MHC monomers each comprise an MHC-binding peptide, wherein each MHC monomer within each single MHC multimer comprises (i.e., is loaded with) the same SARS-CoV-2 peptide and wherein each MHC multimer within the plurality comprises (i.e., is loaded with) a different SARS-CoV-2 peptide, thereby forming a library of SARS-CoV-2 peptides. In one embodiment, each MHC multimer within the plurality further comprises a biotinylated oligonucleotide barcode bound to the biotin-binding site of streptavidin or avidin.

### MHC Polypeptides

[0220] (a) MHC Class I Polypeptides

[0221] The Class I histocompatibility ternary complex consists of three parts associated by noncovalent bonds. The MHC class I heavy chain is a polymorphic transmembrane glycoprotein of about 45 kDa consisting of three extracellular domains, each containing about 90 amino acids (α1 at the N-terminus, α2 and α3), a transmembrane domain of about 40 amino acids and a cytoplasmic tail of about 30 amino acids. The α1 and α2 domains of the MHCI heavy chain contain two segments of alpha helix that form a peptide-binding groove or cleft. A short peptide of about 8-10 but up to 11 amino acids binds noncovalently (“fits”) into this groove between the two alpha helices. The α3 domain of the MHCI heavy chain is proximal to the plasma membrane. The MHCI heavy chain is non-covalently bound to a β2 microglobulin (β2m) polypeptide, forming a ternary complex. In MHCI, the binding groove is closed at both ends by conserved tyrosine residues leading to a size restriction of the bound peptides to usually 8-10 residues but up to 11 residues with its C-terminal end docking into the F-pocket.

[0222] The disclosure provides a multimeric protein comprising a two or more MHCI or MHCI-like polypeptides. The MHCI molecule can suitably be a vertebrate MHC molecule such as a human, a mouse, a rat, a porcine, a bovine or an avian MHC molecule.

[0223] In some embodiments, the multimeric MHCI multimers described herein, the MHC molecule is a human MHC class I protein: HLA-A, HLA-B of HLA-C. In some embodiments, the multimer comprises MHC Class I like molecules (including non-classical MHC Class I molecules) including, but not limited to, CD1d, HLA E, HLA G, HLA F, HLA H, MIC A, MIC B, ULBP-1, ULBP-2, and ULBP-3. The amino acid sequences of the MHCI heavy chains, β2m polypeptides and of MHC Class I like molecules from a variety of vertebrate species are known in the art and publicly available.

[0224] In some embodiments, the MHCI heavy chain alpha domain is human, and comprise, for example, an MHCI heavy chain alpha domain(s) from a human MHC Class I molecule(s) selected from the group consisting of HLA-A*01:01, HLA-A*03:01, HLA-A*11:01, HLA-A*24:02, HLA-B*07:02, HLA-C*04:01, HLA-C*07:02, HLA-B*08:01, HLA-B*35:01, HLA-B*57:01, HLA-B*57:03, HLA-E, HLA-C*16:01, HLA-C*08:02, HLA-C*07:01, HLA-C*05:01, HLA-B*44:02, HLA-A*29:02, HLA-B*44:03, HLA-C*03:04, HLA-B*40:01, HLA-C*06:02, HLA-B*15:01, HLA-C*03:03, HLA-A*30:01, HLA-B*13:02, HLA-C*12:03, HLA-A*26:01, HLA-B*38:01, HLA-B*14:02, HLA-A*33:01, HLA-A*23:01, HLA-A*25:01, HLA-B*18:01, HLA-B*37:01, HLA-B*51:01, HLA-C*14:02, HLA-C*15:02, HLA-C*02:02, HLA-B*27:05, HLA-A*31:01, HLA-A*30:02, HLA-B*42:01, HLA-C*17:01, HLA-B*35:02, HLA-B*39:06, HLA-C*03:02, HLA-B*58:01, HLA-A*33:03, HLA-A*68:02, HLA-C*01:02, HLA-C*07:04, HLA-A*68:01, HLA-A*32:01, HLA-B*49:01, HLA-B*53:01, HLA-B*50:01, HLA-A*02:05, HLA-B*55:01, HLA-B*45:01, HLA-B*52:01, HLA-C*12:02, HLA-B*35:03, HLA-B*40:02, HLA-B*15:03 and/or HLA-A*74:01. The full-length amino acid sequences (including signal sequence and transmembrane domain) of these MHCI molecules are shown in SEQ ID NOs: 28-93, respectively. The amino acid sequences of soluble forms of these MHCI molecules (lacking signal sequence and transmembrane domain) are shown in SEQ ID NOs: 94-159, respectively.

[0225] In some embodiments, the pMHCI multimers described herein comprises the α1 and α2 domains of an MHCI heavy chain. In some embodiments, the compound described herein comprises the α1, α2, and α3 domains of an MHCI heavy chain.

[0226] In some embodiments, the two or more pMHCI or pMHCI-like polypeptides in the multimer comprises a β2-microglobulin polypeptide, e.g., a human β2-microglobulin. In some embodiments, the β2-microglobulin is wild-type human β2-microglobulin. In some embodiments, the β2-microglobulin comprises an amino acid sequence that is at least 80, 85, 90, 95, or 99% identical to the amino acid sequence of the human β2 microglobulin, the full-length sequence of which is shown in SEQ ID NO: 160 (UniProt Id. No. P61769). Alternatively, the human β2-microglobulin polypeptide used in the pMHCI multimer can comprise or consist of the amino acid sequence shown in SEQ ID NO: 2.

[0227] In some embodiments, the multimeric protein comprises a soluble MHCI polypeptide. In some embodiments the MHC-multimeric protein comprises a soluble MHCI α domain and a β2-microglobulin polypeptide. In some embodiments, the soluble MHCI protein comprises the MHCI heavy chain α1 domain and the MHCI heavy chain α2 domain.

[0228] Alternatively, in some embodiments, the MHCI monomer is a fusion protein comprising a β2m polypeptide or functional fragment thereof covalently linked to the MHCI heavy chain or functional fragment thereof. In some embodiments the carboxy (—COOH) terminus of β2m is covalently linked to the amino (−NH₂) terminus of the MHCI heavy chain.

[0229] In some embodiments, the MHC monomers comprise one or more linkers between the individual components of the MHCI monomer. In some embodiments, the MHCI monomer comprises a heavy chain fused with β2m through a linker. In some embodiments, the linker between the heavy chain and β2m is a flexible linker, e.g., made of glycine and serine. In some embodiments, the flexible linker between the heavy chain and β2m is between 5-20 residues long. In other embodiments, the linker between the heavy chain and β2m is rigid with a defined structure, e.g. made of amino acids like glutamate, alanine, lysine, and leucine. In one embodiment, the linker is a (G4S)₄ linker (SEQ ID NO: 181, wherein n=4).

[0230] The amino acid sequences of a number of MHC Class I proteins are known, and the genes have been cloned, therefore, the heavy chain monomers can be expressed using recombinant methods. Methods for the expression and purification of MHCI molecules have been extensively described (e.g., Altman et al., Curr. Protoc. Enz. 17.3.1-17.2-44, 2016). For example, the MHCI heavy chain and β2-microglobulin can be expressed in separate cells, and isolated by purification and then refolded in vitro. For example, the MHC polypeptide chains can be expressed in E. coli, where MHC polypeptide chains accumulate as insoluble inclusion bodies in the bacterial cell. In vitro refolding occurs in a refolding buffer where the polypeptides are added by e.g. dialysis or dilution. Refolding buffers can be any buffer wherein the MHC polypeptide chains and peptide are allowed to reconstitute the native trimer fold. The buffer may contain oxidative and/or reducing agents thereby creating a redox buffer system helping the MHC proteins to establish the correct fold. Examples of suitable refolding buffers include but are not limited to Tris-buffer, CAPS buffer, TAPs buffer, PBS buffer, other phosphate buffer, carbonate buffer and Ches buffer. Chaperone molecules or other molecules improving correct protein folding may also be added and likewise agents increasing solubility and preventing aggregate formation may be added to the buffer. Examples of such molecules include but is not limited to Arginine, GroE, HSP70, HSP90, small organic compounds, DnaK, CIpB, proline, glycinbetaine, glycerol, tween, salt, PLURONIC™.

[0231] Once expressed the MHCI complexes can be purified directly as whole MHCI or MHCI-peptide monomers from MHCI expressing cells. The MHCI monomers may be expressed on the surface of cells, and are then isolated by disruption of the cell membrane using, e.g., detergent followed by purification of the MHCI. In some embodiments, MHC monomers are expressed into the periplasm and expressing cells are lysed and released MHCI monomers purified. Alternatively, MHC monomers may be purified from the supernatant of cells secreting expressed proteins into culture supernatant. Methods for purifying MHCI monomers are well known in the art, for example, via the use of affinity tags together with affinity chromatography, beads coated with ant-tag and/or other techniques involving immobilization of MHCI protein to affinity matrix; size exclusion chromatography using, e.g., gel filtration, ion exchange or other methods able to separate MHC molecules from cells and/or cell lysates.

[0232] In some embodiments, recombinant expression of MHCI polypeptides allow a number of modifications of the MHC monomers. For example, recombinant techniques provide methods for carboxy terminal truncation which deletes the hydrophobic transmembrane domain. The carboxy termini can also be arbitrarily chosen to facilitate the conjugation of ligands or labels, for example, by introducing cysteine and/or lysine residues into the molecule. The synthetic gene will typically include restriction sites to aid insertion into expression vectors and manipulation of the gene sequence. The genes encoding the appropriate monomers are then inserted into expression vectors, expressed in an appropriate host, such as E. coli, yeast, insect, or other suitable cells, and the recombinant proteins are obtained. For example, the production of MHC class I polypeptides includes bacterial expression and folding of the MHC class I light chain, β2-microglobulin (β2m), as well as the formation of a complex consisting of the MHC class I heavy chain, β2m, and a placeholder peptide.

[0233] In some embodiments, the MHCI monomers are biotinylated on either their heavy chain or β2m. In some embodiments, the MHCI monomers are biotinylated before loading of the peptide either by refolding or peptide exchange. Biotinylation of the MHC monomers can be achieved as known in the art, e.g. by attaching biotin to a specific attachment site which is the recognition site of a biotinylating enzyme. In some embodiments, the biotinylating enzyme is BirA. In some embodiments, biotinylation is carried out on the desired protein chain in vivo as a post translational modification during protein expression.

[0234] (b) MHC Class II Polypeptides

[0235] MHC class II molecules are heterodimers composed of an a chain and a β chain, both of which are encoded by the MHC. The alpha chain is comprised of α1 and α2 domains. The beta chain is comprised of β1 and β 2 domains. The α1 and β1 domains of the chains interact noncovalently to form a membrane-distal peptide-binding domain, whereas the α2 and β2 domains form a membrane-proximal immunoglobulin-like domain. The antigen binding groove, where a peptide epitope binds, is made up of two α-helices and a β-sheet. Since the antigen binding groove of MHC class II molecules is open at both ends, the groove can accommodate longer peptide epitopes than MHC class I molecules. Peptide epitopes presented by MHC class II molecules can be 13-25 amino acids in length but typically are about 15-24 amino acid residues in length.

[0236] The disclosure provides a multimeric protein comprising two or more MHCII or MHCII-like polypeptides. The MHCII molecule can suitably be a vertebrate MHCII molecule such as a human, a mouse, a rat, a porcine, a bovine or an avian MHCII molecule.

[0237] In some embodiments, the multimeric MHCII multimers described herein, the MHC molecule is a human MHC class II protein: HLA-DR, HLA-DQ, HLA-DX, HLA-DO, HLA-DZ, and HLA-DP. The amino acid sequences of the MHCII a and 13 chains from a variety of vertebrate species, including humans, are known in the art and publicly available.

[0238] In some embodiments, the human MHCII molecule is of an allotype selected from the group consisting of DRB1*0101 (see, e.g., Cameron et al. (2002) J Immunol. Methods, 268:51-69; Cunliffe et al. (2002) Eur. J. Immunol., 32:3366-3375; Danke et al. (2003)J. Immunol., 171:3163-3169), DRB1*1501 (see, e.g., Day et al. (2003)J Clin. Invest, 112:831-842), DRBS*0101 (see, e.g., Day et al., ibid), DRB1*0301 (see, e.g., Bronke et al. (2005) Hum. Immunol., 66:950-961), DRB1*0401 (see, e.g., Meyer et al. (2000) PNAS, 97:11433-11438; Novak et al. (1999) J. Clin. Invest, 104:R63-R67; Kotzin et al. (2000) PNAS, 97:291-296), DRB1*0402 (see, e.g., Veldman et al. (2007) Clin. Immunol., 122:330-337), DRB1*0404 (see, e.g., Gebe et al. (2001)) Immunol. 167:3250-3256), DRB1*1101 (see, e.g., Cunliffe, ibid; Moro et al. (2005) BMC Immunol., 6:24), DRB1*1302 (see, e.g., Laughlin et al. (2007) Infect. Immunol. 75:1852-1860), DRB1*0701 (see, e.g., Danke, ibid), DQA1*0102 (see, e.g., Kwok et al. (2000) J Immunol., 164:4244-4249), DQB1*0602 (see, e.g., Kwok, ibid), DQA1*0501 (see, e.g., Quarsten et al. (2001) J Immunol., 167:4861-4868), DQB1*0201 (see, e.g., Quarsten, ibid), DPA1*0103 (see, e.g., Zhang et al. (2005) Eur. J. Immunol, 35:1066-1075; Yang et al. (2005) J Clin. Immunol., 25:428-436), and DPB1*0401 (see, e.g., Zhang, ibid; Yang, ibid).

[0239] In some embodiments, the MHCII molecule is human, and comprise, for example, an MHCII alpha and beta chains selected from the group consisting of HLA-DRA*01:01, HLA-DRB1*01:01, HLA-DRB1*01:02, HLA-DRB1*03:01, HLA-DRB1*04:01, HLA-DRB1*04:04, HLA-DRB1*07:01, HLA-DRB1*08:01, HLA-DRB1*10:01, HLA-DRB1*11:01, HLA-DRB1*11:04, HLA-DRB1*13:01, HLA-DRB1*13:02, HLA-DRB1*14:01, HLA-DRB1*15:01, HLA-DRB1*15:03, HLA-DQA1*01:01, HLA-DQB1*05:01, HLA-DQA1*01:02, HLA-DQB1*06:02, HLA-DQA1*03:01, HLA-DQB1*03:02, HLA-DQA1*05:01, HLA-DQB1*02:01, HLA-DQB1*03:01, HLA-DQB1*03:03, HLA-DQB1*04:02, HLA-DQB1*05:03, HLA-DQB1*06:03 and HLA-DQB1*06:04. The full-length amino acid sequences (including signal sequence and transmembrane domain) of these MHCII chains are shown in SEQ ID NOs: 194-223, respectively. The amino acid sequences of soluble forms of these MHCII chains (lacking signal sequence and transmembrane domain) are shown in SEQ ID NOs: 224-253, respectively.

[0240] In certain embodiments, an additional amino acid sequence can be appended to the C-terminal sequence of the alpha or beta chain of the MHCII molecule, for example for purposes of labeling and/or for attaching a moiety that mediates attachment (e.g., conjugation) to the multimerization domain. For example, an avitag (that mediates binding through the biotin binding site of Say) can be appended, such as an avitag with a Myc tag and a His tag (SEQ ID NO: 254) or an avitag with a Myc tag (SEQ ID NO: 255). In another embodiment, a sortag (that can mediate conjugation of click chemistry moieties through sortase, as described herein) can be appended, such as the sortag shown in SEQ ID NO: 257 or a sortag with a His tag as shown in SEQ ID NO: 256. In another embodiment, a V5 tag (SEQ ID NO: 258) is appended to the C-terminus.

[0241] In certain embodiments, heterodimerization pairs can be appended to the C-terminal sequence of the alpha and/or beta chains of the MHCII molecule. Non-limiting examples of such heterodimerization pair sequences include Fos and Jun (e.g., having the amino acid sequences shown in SEQ ID NOs: 259 and 260, respectively), acidic and basic leucine zippers (e.g., having the amino acid sequences shown in SEQ ID NOs: 261 and 262, respectively), knob and hole sequences (e.g., having the amino acid sequences shown in SEQ ID NOs: 263 and 264, respectively) for knobs-into-holes technology or spytab and spycatcher sequences (e.g., having the amino acid sequences shown in SEQ ID NOs: 265 and 266, respectively).

[0242] In certain embodiments, an MHCII-binding placeholder peptide is included in the expression construct for one of the MHCII chains, preferably the beta chain, such that the placeholder peptide and a digestible linker are encoded in the construct upstream of (N-terminally) and in operative linkage with the coding sequences for the MHCII chain. For example, the expression construct can encode (from N- to C-terminus): a placeholder peptide, an digestible linker, the MHCII chain (e.g., beta chain) and a C-terminal tag (e.g., encoding the amino acid sequence shown in SEQ ID NO: 192). In certain embodiments, an N-terminal tag is also appended upstream of the placeholder peptide, which allows for removal of non-exchanged peptide species following peptide exchange. Non-limiting examples of such N-terminal tags include a FLAG tag (e.g., having the amino acid sequence shown in SEQ ID NO: 267), a Strep-Tag (e.g., having the amino acid sequence shown in SEQ ID NO: 268) and a Protein C tag (e.g., having the amino acid sequence shown in SEQ ID NO: 269).

[0243] In some embodiments, the pMHCII multimers described herein comprise the α1 and α2 domains of an MHCII alpha chain and the β1 and β2 domains of an MHCII beta chain. In some embodiments, the multimer described herein comprises only the α1 and β1 domains of an MHCII heavy chain. In other embodiments, the pMHCII multimers comprise an alpha-chain and a beta-chain combined with a peptide. Other embodiments include an MHCII molecule comprised only of alpha-chain and beta-chain (so-called “empty” MHC II without loaded peptide), a truncated alpha-chain (e.g. the α1 domain) combined with full-length beta-chain, either empty or loaded with a peptide, a truncated beta-chain (e.g. the β1 domain) combined with a full-length alpha-chain, either empty or loaded with a peptide, or a truncated alpha-chain combined with a truncated beta-chain (e.g. α1 and β1 domain), either empty or loaded with a peptide.

[0244] In some embodiments, the multimeric protein comprises a soluble MHCII polypeptide. In some embodiments the MHC-multimeric protein comprises a soluble MHCII lacking transmembrane and intracellular domains.

[0245] The amino acid sequences of numerous MHC Class II proteins, including human MHCII, are known in the art, and the genes have been cloned. Therefore, the alpha and beta chain monomers can be expressed using recombinant methods. Methods for the expression and purification of MHCII molecules have been extensively described (e.g., Crawford et al. (1998) Immunity, 8:675-682; Novak et al. (1999) J. Clin. Invest., 104:R63-R67; Nepom et al. (2002) Arthrit. Rheum., 46:5-12; Day et al. (2003) J. Clin. Invest., 112:831-842; Vollers and Stern (2008) Immunol., 123:305-313; Cecconi et al. (2008) Cytometry, 73A:1010-1018, the entire contents of each of which is hereby incorporated by reference).

[0246] For MHC II molecules the alpha-chain and beta-chain may be expressed in separate cells as individual polypeptides or in the same cell as a fusion protein. The peptide of the MHC II-peptide complex may be produced separately and added following purification of whole MHC complexes or added during in vitro refolding or expressed together with alpha-chain and/or beta-chain connected to either chain through a linker. The genetic material can encode all or only a fragment of MHC class II alpha- and beta-chains. The genetic material may be fused with genes encoding other proteins, including proteins useful in purification of the expressed polypeptide chains (e.g., purification tags), proteins useful in increasing/decreasing solubility of the polypeptide(s), proteins useful in detection of polypeptide(s), proteins involved in coupling of MHC complex to multimerization domains and/or coupling of labels to MHC complex and/or MHC multimer.

[0247] In contrast to MHC I complexes, MHC II complexes are not easily refolded after denaturation in vitro. Only some MHC II alleles can be expressed in E. coli and refolded in vitro. Therefore, preferred expression systems for production of MHC II molecules are eukaryotic systems where refolding after expression of protein is not necessary. Preferred expression systems include mammalian expression systems, such as CHO cells, HEK cells or other mammalian cell lines suitable for expression of human proteins. Other expression systems include stable Drosophila cell transfectants, baculovirus infected insect T cells or other mammalian cell lines suitable for expression of proteins.

[0248] Stabilization of soluble MHC II complexes is even more important than for MHC I molecules, since both alpha- and beta-chain are participants in formation of the peptide binding groove and tend to dissociate when not embedded in the cell membrane. Accordingly, in one embodiment, MHCII monomers are prepared in which the peptide is covalently linked to the MHCII molecule. For example, one approach is the covalent synthesis of single-chain MHC class II chain-peptide complexes, directed by engineering peptide-specific complementary DNA (cDNA) sequences proximal to the beta-chain cDNA (as described in Crawford et al. (1999) Immunity, 8:675-682). In this strategy, the resulting polypeptide refolds with the peptide sequence extended from the amino terminus of the class II molecule. A tethering linker sequence in the peptide allows enough flexibility for the peptide to occupy the peptide binding groove in the mature class II molecule. A cleavable linker can be used to allow for cleavage of the covalent linkage between the peptide and the MHCII molecule (e.g., as described in Day et al. (2003) J. Clin. Invest., 112:831-842), thereby allowing for peptide exchange and loading of the MHCII molecule with other peptides (e.g., a library of different peptides).

[0249] Once expressed, the MHCII complexes can be purified directly as whole MHCII or MHCII-peptide monomers from MHCII expressing cells. The MHCII monomers may be expressed on the surface of cells, and are then isolated by disruption of the cell membrane using, e.g., detergent followed by purification of the MHCII. In some embodiments, MHC monomers are expressed into the periplasm and expressing cells are lysed and released MHCII monomers purified. Alternatively, MHC monomers may be purified from the supernatant of cells secreting expressed proteins into culture supernatant. Methods for purifying MHCII monomers are well known in the art, for example, via the use of affinity tags together with affinity chromatography, beads coated with ant-tag and/or other techniques involving immobilization of MHCII protein to affinity matrix; size exclusion chromatography using, e.g., gel filtration, ion exchange or other methods able to separate MHC molecules from cells and/or cell lysates.

[0250] In some embodiments, recombinant expression of MHCII polypeptides allow a number of modifications of the MHC monomers. For example, recombinant techniques provide methods for carboxy terminal truncation which deletes the hydrophobic transmembrane domain. The carboxy termini can also be arbitrarily chosen to facilitate the conjugation of ligands or labels, for example, by introducing cysteine and/or lysine residues into the molecule. The synthetic gene will typically include restriction sites to aid insertion into expression vectors and manipulation of the gene sequence. The genes encoding the appropriate monomers are then inserted into expression vectors, expressed in an appropriate host, such as E. coli, yeast, insect, or other suitable cells, and the recombinant proteins are obtained.

[0251] In some embodiments, the MHCII monomers are biotinylated on either their alpha or beta chain. In some embodiments, the MHCII monomers are biotinylated before loading of the peptide either by refolding or peptide exchange. Biotinylation of the MHC monomers can be achieved as known in the art, e.g. by attaching biotin to a specific attachment site which is the recognition site of a biotinylating enzyme. In some embodiments, the biotinylating enzyme is BirA. In some embodiments, biotinylation is carried out on the desired protein chain in vivo as a post translational modification during protein expression.

### Placeholder Peptides

[0252] (a) MHC Class I Placeholder Peptides

[0253] In the methods provided herein, the MHCI monomers are loaded with a placeholder peptide to facilitate proper folding of the MHCI monomers to produce placeholder-peptide loaded MHCI (p*MHCI) prior to multimerization. Examples of placeholder peptides and methods of inducing folding MHCI heavy chains and β2-microglobulin in vitro in the presence of a placeholder peptide have been described in the art (e.g., Bakker et al. 2008) PNAS 105:3825-3830; Rodenko et al. (2006) Nat. Prot. 1: 1120-1132).

[0254] In some embodiments, the placeholder peptide is an HLA-A, HLA-B or HLA-C peptide. In some embodiments, the placeholder peptide is an HLA-A1 peptide (e.g., A1:01 binding peptide). In some embodiments, the placeholder peptide is an HLA-A2 peptide (e.g., A02-01 binding peptide). In other embodiments, the placeholder peptide is an HLA-A3 peptide (e.g., A3:01 binding peptide), an HLA-A11 peptide (e.g., A11:01 binding peptide), an HLA-A24 peptide (e.g., A24:02 binding peptide), an HLA-B7 peptide (e.g., B7:02 binding peptide), an HLA-B8 peptide (e.g., B8:01 binding peptide), an HLA-B15 peptide (e.g., B15:01 binding peptide), an HLA-B35 peptide (e.g., B35:01 binding peptide), an HLA-B40 peptide (e.g., B40:01 binding peptide), an HLA-B58 peptide (e.g., B58:01 binding peptide), an HLA-C3 peptide (e.g., C3:04 binding peptide), an HLA-C4 peptide (e.g., C4:01 binding peptide) an HLA-C7 peptide (e.g., C7:02 binding peptide) or an HLA-C8 peptide (e.g., C8:01 binding peptide). In some embodiments, the placeholder peptide is a synthetic peptide.

[0255] In some embodiments, the affinity of the placeholder peptide for the binding groove of MHCI is lower than the rescue peptide(s). In some embodiments, the affinity of the placeholder peptide for the MHCI binding groove is about 10-fold lower than the rescue peptide(s). In some embodiments, the affinity of the place holder peptide for the binding groove of MHCI is higher than the rescue peptide(s); however, the placeholder peptide can still be replaced by the rescue peptide by use of an excess concentration of the rescue peptide.

[0256] In some embodiments, the placeholder peptide is thermolabile. Is some embodiments, the placeholder peptide is thermolabile at a temperature between about 30-37° C. In some embodiments, the placeholder peptide is labile at a temperature at or above 30° C., at or above 32° C., at or above 34° C., at or above 35° C., at or above 36° C., or at about 37° C. Thermal labile placeholder peptides and methods of identifying and producing thermal labile placeholder peptides have been described (e.g., WO 93/10220; WO 2005/047902; US 2008/0206789; Luimstra et al. (2019) Curr. Protoc. Immunol. 126(1):e85; Luimstra et al. (2018) J. Exp. Med. 215(5):1493-1504).

[0257] In some embodiments the placeholder peptide is labile at an acidic pH. In some embodiments, the placeholder peptide is labile between about pH 2.5 and 6.5. In some embodiments, the placeholder peptide is labile at a pH of about 2.5-6.0, 3.0-6.0, 3.0-6.5, 3.5-6.0 3.5-6.5, 4.0-6.0, 4.0-6.5, 4.5-6.0, 4.5-6.5, 5.0-6.0, 5.0-6.5, 5.0, 5.5, 6.0 or 6.5. In some embodiments, the placeholder peptide is labile at a basic pH. In some embodiments, the placeholder peptide is labile between about pH 9-11. In some embodiments, the placeholder peptide is labile at or above pH 9, at or above pH 9.5, at or about pH 10, at or about pH 10.5, or at or about pH 11. Methods of generating and using pH sensitive placeholder peptides are publicly available, for example, as described in WO 93/10220; US 2008/0206789; and Cameron et al. (2002), 1 Immunol. Meth. 268:51-59.

[0258] In some embodiments, the placeholder peptide comprises a cleavable moiety. Various types of cleavable moieties are known in the art and include, for example, moieties that are cleaved by photoirradiation, enzymes, nucleophilic or electrophilic agents, reducing and oxidizing reagents (e.g., reviewed in Leriche et al., Biorg. Med. Chem. 20(2):571-582, 2012).

[0259] In some embodiments, the cleavable placeholder peptide comprises one or more photocleavable non-natural β-amino acids. In some embodiments, the placeholder peptide comprises 3-amino-3-(2-nitro-phenyl)-proprionic acid. In some embodiments, the placeholder peptide comprises (2-nitro)phenylglycine. In some embodiments, the placeholder peptide comprises an azobenzene group. In some embodiments, the HLA-A2 placeholder peptide is p*A02:01, KILGFVFJV (SEQ ID NO: 15) or GILGFVFJL (SEQ ID NO: 7), wherein J is 3-amino-3-(2-nitro)phenyl-propionic acid. In some embodiments, the placeholder peptide is selected from the group consisting of p*A1:01, STAPGJLEY (SEQ ID NO: 16); p*A3:01, RIYRJGATR (SEQ ID NO:17); p*A11:01, RVFAJSFIK (SEQ ID NO: 18); p*A24:02, VYGJVRACL (SEQ ID NO: 11); p*B7:02, AARGJTLAM (SEQ ID NO: 14); p*B35:01, KPIVVLJGY (SEQ ID NO: 19); p*C3:04, FVYGJSKTSL (SEQ ID NO: 20), p*B8:01, FLRGRAJGL (SEQ ID NO: 21); p*C7:02, VRIJHLYIL (SEQ ID NO: 22); p*C4:01, QYDJAVYKL (SEQ ID NO: 23); p*B15:01, ILGPJGSVY (SEQ ID NO: 24); p*B40:01, TEADVQJWL (SEQ ID NO: 25); p*B58:01, ISARGQJLF (SEQ ID NO: 26); and p*C8:01, KAAJDLSHFL (SEQ ID NO: 27), wherein J is 3-amino-3-(2-nitro)phenyl-propionic acid. Methods of generating placeholder peptides containing photocleavable amino acids are known in the art and have been previously described (e.g., Toebes et al., Curr. Protoc. Immunol. 87:18.16.1-18.16.20, 2009; Bakker et al., supra, Rodenko et al. supra). In various embodiments, the photocleavable placeholder peptide is cleaved upon exposure to UV-light using previously described methods (e.g., Toebes et al., (2006) Nat Med. 12(2):246-51; Bakker et al. (2008) Proc Natl Acad Sci USA. 105(10):3825-30; Rodenko et al. (2006) Nat Protoc. 1(3):1120-32; Frosig et al., (2015) Cytometry A. 87(10):967-75).

[0260] In some embodiments, the placeholder peptide comprises a chemoselective moiety. In some embodiments, the chemoselective moiety comprises a sodium dithionite sensitive azobenzene linker, wherein the azobenzene comprises at least one aromatic group comprising an electron-donor group and is located between two amino acid residues. Azobenzine linkers and methods for chemoselective peptide exchange are known in the art, for example, as described in U.S. Pat. No. 10,400,024.

[0261] In some embodiments, the placeholder peptide comprises a cleavable moiety that is cleaved upon exposure to an aminopeptidase. In some embodiments, the cleavage of the amino acid residue occurs via the use of a methionine aminopeptidase. The methionine aminopeptidase can cleave a methionine from a peptide when the amino acid residue at position two is, for example, glycine, alanine, serine, cysteine, or proline. In some embodiments, the cleavable moiety comprises a thrombin cleavage domain.

[0262] In some embodiments, the placeholder peptide comprises a cleavable moiety is sensitive to a chemical trigger. In some embodiments, the placeholder peptide comprises periodate-sensitive amino acid. In some embodiments, the periodate-sensitive amino acid comprises a vicinal diol moiety. In some embodiments, the periodate-sensitive amino acid comprises a vicinal amino alcohol. In some embodiments, the periodate-sensitive amino acid is 1,2-amino-alcohol-containing amino acid. In some embodiments, the periodate-sensitive amino acid is α,γ-diamino-β-hydroxybutanoic acid (DAHB). Methods for producing and using peptides containing periodate-sensitive amino acids are publicly available, for example, as described in Rodenko et al. ((2009) J. Am. Chem. Soc. 131:12605-12313) and Amore et al. ((2013) ChemBioChem 14:123-131).

[0263] In some embodiments, the placeholder peptide is a dipeptide. In some embodiments, the dipeptide binds to the F pocket of the MHCI binding groove. In some embodiments, the second amino acid of the dipeptide is hydrophobic. In some embodiments, the dipeptide is selected from the group consisting of glycyl-leucine (GL), glycyl-valine (GV), glycyl-methione (GM), glycyl-cyclohexylalanine (GCha), glycyl-homoleucine (GHle) and glycyl-phenylalanine (GF). Methods for producing and using dipeptides as placeholder peptides are publicly available, for example, as described in Saini et al. (PNAS 112:202-207, 2015).

[0264] In some embodiments, the placeholder peptide comprises GILGFVFJL (SEQ ID NO:7). In some embodiments, the placeholder peptide consists of GILGFVFJL (SEQ ID NO:7).

[0265] In some embodiments, the placeholder peptide further comprises a fluorescent label. In some embodiments, the fluorescent label is attached to a cysteine residue in the placeholder peptide.

[0266] In some embodiments, p*MHCI molecules are purified, and stored to serve as a source of stock molecules that can be exchanged with peptide epitopes of interest upon exposure to peptide exchange conditions as described herein.

[0267] (b) MHC Class II Placeholder Peptides

[0268] In the methods provided herein, the MHCII monomers are loaded with a placeholder peptide to facilitate proper folding of the MHCII monomers to produce placeholder-peptide loaded MHCII (p*MHCII) prior to multimerization. In various embodiments, the placeholder peptide is peptide that binds HLA-DR, HLA-DQ, HLA-DX, HLA-DO, HLA-DZ or HLA-DP. In some embodiments, the placeholder peptide is a synthetic peptide.

[0269] In some embodiments, the affinity of the placeholder peptide for the binding groove of MHCII is lower than the rescue peptide(s). In some embodiments, the affinity of the placeholder peptide for the MHCII binding groove is about 10-fold lower than the rescue peptide(s).

[0270] In some embodiments, the placeholder peptide is thermolabile. In some embodiments, the placeholder peptide is thermolabile at a temperature between about 30-37° C. In some embodiments, the placeholder peptide is labile at a temperature at or above 30° C., at or above 32° C., at or above 34° C., at or above 35° C., at or above 36° C., or at about 37° C. Thermal labile placeholder peptides and methods of identifying and producing thermal labile placeholder peptides have been described (e.g., WO 93/10220; WO 2005/047902; US 2008/0206789; Luimstra et al., Curr. Protoc. Immunol. 126(1):e85, 2019; Luimstra et al., J. Exp. Med. 215(5):1493-1504, 2018).

[0271] In some embodiments the placeholder peptide is labile at an acidic pH. In some embodiments, the placeholder peptide is labile between about pH 2.5 and 6.5. In some embodiments, the placeholder peptide is labile at a pH of about 2.5-6.0, 3.0-6.0, 3.0-6.5, 3.5-6.0 3.5-6.5, 4.0-6.0, 4.0-6.5, 4.5-6.0, 4.5-6.5, 5.0-6.0, 5.0-6.5, 5.0, 5.5, 6.0 or 6.5. In some embodiments, the placeholder peptide is labile at a basic pH. In some embodiments, the placeholder peptide is labile between about pH 9-11. In some embodiments, the placeholder peptide is labile at or above pH 9, at or above pH 9.5, at or about pH 10, at or about pH 10.5, or at or about pH 11. Methods of generating and using pH sensitive placeholder peptides are publicly available, for example, as described in WO 93/10220; US 2008/0206789; and Cameron et al. (2002) J. Immunol. Meth. 268:51-59.

[0272] In some embodiments, the placeholder peptide comprises a cleavable moiety. Various types of cleavable moieties are known in the art and include, for example, moieties that are cleaved by photoirradiation, enzymes, nucleophilic or electrophilic agents, reducing and oxidizing reagents (e.g., reviewed in Leriche et al. (2012) Biorg. Med. Chem. 20(2):571-582).

[0273] In one embodiment, the placeholder peptide is fused to a degradation tag and peptide exchange is promoted by proteolysis in the presence of a corresponding protease (the digests the degradation tag) along with the presence of the rescue peptide(s).

[0274] In some embodiments, the cleavable placeholder peptide is a photocleavable peptide, e.g., cleaved upon exposure to UV light. For example, the placeholder peptide can comprise one or more photocleavable non-natural amino acids. MHCII-binding photocleavable peptides, e.g., that incorporate the UV-sensitive amino acid analog 3-amino-3-(2-nitrophenyl)-propionate have been described (see e.g., Negroni and Stern (2018) PLos One, 13(7):e0199704).

[0275] In one embodiment, the MHCII placeholder peptide is a CLIP peptide, such as having the amino acid sequence KPVSKMRMATPLLMQA (SEQ ID NO: 189). In one embodiment, the CLIP peptide is cleavable. In one embodiment, the MHCII monomers are synthesized with the cleavable CLIP peptide covalently attached, such as by synthesis of single-chain MHC class II chain-peptide complexes, directed by engineering peptide-specific complementary DNA (cDNA) sequences proximal to the beta-chain cDNA (see e.g., Day et al. (2003) J. Clin. Invest., 112:831-842). Cleavage of the covalent linkage between the CLIP peptide (as the placeholder peptide) and MHCII thus allows for peptide exchange with other MHCII-binding peptides.

[0276] Other MHCII binding peptides have been described in the art that can be used as placeholder peptides, based on appropriate pairing of an MHCII molecule and its known MHCII binding peptide. Non-limiting examples of known MHCII molecule/MHCII binding peptide pairs include: DRA1*0101/DRB1*0401 and the immunodominant peptide of hemagglutinin, HA₃₀₇₋₃₁₉ (see Novak et al. (1999) J. Clin. Invest., 104:R63-R67) and HLA-DR*1101 and tetanus-toxoid (TT)-derived p2 peptide (TT₈₃₀₋₈₄₄) having the amino acid sequence QIYKANSKFIGITEL (SEQ ID NO: 190) (see Cecconi et al. (2008) Cytometry, 73A:1010-1018).

Production of p*MHC Multimers

[0277] Multimerization domains for use in producing the pMHC multimers provided herein include proteins, polypeptide or other multimeric moieties suitable for the covalent conjugation of two or more pMHC or p*MHC monomers, which do not interfere with binding of the pMHC polypeptides to cells. In some embodiments, the multimerization domain comprises protein subunits. In some embodiments, the multimerization domain is a homomultimer of protein subunits. In some embodiments, the multimerization domain is a heteromultimer of protein subunits. In some embodiments, the multimer is a dimer, trimer, tetramer, pentamer, hexamer, octamer, decamer or dodecamer. In one embodiment, the pMHC multimer is a tetramer.

[0278] Examples of suitable binding entities are streptavidin (SA) and avidin and derivatives thereof, biotin, immunoglobulins, antibodies (monoclonal, polyclonal, and recombinant), antibody fragments and derivatives thereof, leucine zipper domain of AP-1 (jun and fos), hexa-his (metal chelate moiety), hexa-hat GST (glutathione S-transferase) glutathione affinity, Calmodulin-binding peptide (CBP), Strep-Tag®, Cellulose Binding Domain, Maltose Binding Protein, S-Peptide Tag, Chitin Binding Tag, Immuno-reactive Epitopes, Epitope Tags, E2Tag, HA Epitope Tag, Myc Epitope, FLAG Epitope, AU1 and AU5 Epitopes, Glu-Glu Epitope, KT3 Epitope, IRS Epitope, Btag Epitope, Protein Kinase-C Epitope, VSV Epitope, lectins that mediate binding to a diversity of compounds, including carbohydrates, lipids and proteins, e. g., Con A (Canavaliaensi formis) or WGA (wheat germ agglutinin) and tetranectin or Protein A or G (antibody affinity) or coiled-coil polypeptides e.g. leucine zipper. Combinations of such binding entities are also included.

[0279] In some embodiments, the multimerization domain is a tetramer of streptavidin (SA or SAv) or a derivative thereof. In some embodiments, the multimerization domain is tetrameric streptavidin. In some embodiments, the tetramer comprises Strep-Tag® or Strep-Tactin®. Strep-Tag® or Strep-Tactin® are described in U.S. Pat. Nos. 5,506,121 and 6,103,493, respectively, and are commercially available from a number of sources. To attach MHC monomers to streptavidin non-covalently via the biotin-binding site of SAv, an avitag (such as having the amino acid sequence shown in SEQ ID NO: 161, which includes a 6×His Tag and a FLAG tag) can be incorporated into MHC monomer, for example at the C-terminal end (see e.g., Example 3).

[0280] In the methods provided herein, pMHC multimers are produced by covalent conjugation of each p*MHC monomer to the N- or C-terminal of each subunit of the multimerization domain, resulting in a reaction product referred to herein as a Conjugated Multimer. In one embodiment, the Conjugated Multimer is a pMHC Class I (pMHCI) Conjugated Multimer. In another embodiment, the Conjugated Multimer is a pMHC Class II (pMHCII) Conjugated Multimer.

[0281] In some embodiments, pMHCI multimers are produced by covalent conjugation of the multimerization domain to the C-terminus of the MHCI α1 domain. In some embodiments, the pMHCI multimers are produced by covalent conjugation of the multimerization domain to the C-terminus of the MHCI α2 domain. In some embodiments, the pMHCI multimers are produced by covalent conjugation of the multimerization domain to the C-terminus of the MHCI α3 domain. In some embodiments, the pMHCI multimers are produced by covalent conjugation of the multimerization domain to the C-terminus of the β2-microglobulin of each p*MHC monomer.

[0282] In a preferred embodiment, pMHCII multimers are produced by covalent conjugation of the multimerization domain to the MHCII α chain. In another embodiment, pMHCII multimers are produced by covalent conjugation of the multimerization domain to the MHCII β chain. In certain embodiments, pMHCII multimers are produced by covalent conjugation of the multimerization domain to the C-terminus of the MHCII α1 domain. In certain embodiments, the pMHCII multimers are produced by covalent conjugation of the multimerization domain to the C-terminus of the MHCII α2 domain. In certain embodiments, the pMHCII multimers are produced by covalent conjugation of the multimerization domain to the C-terminus of the MHCII β1 domain. In certain embodiments, the pMHCII multimers are produced by covalent conjugation of the multimerization domain to the C-terminus of the MHCII β2 domain.

[0283] A number of suitable methods for forming covalent bonds between each MHC monomer and the multimerization domain are provided herein.

[0284] (a) Chemical Bioconjugation

[0285] In some embodiments, the p*MHC multimers are produced by chemical conjugation. In some embodiments, the chemical conjugation is mediated by cysteine bioconjugation of the p*MHC polypeptides to the multimerization domain. In some embodiments, the cysteine bioconjugation is mediated by cysteine alkylation. In some embodiments, the cysteine bioconjugation is mediated by cysteine oxidation. In other embodiments, the cysteine bioconjugation is mediated by a desulfurization reaction. In some embodiments, cysteine bioconjugation is mediated by iodoacetamide. In some embodiments, the cysteine bioconjugation is mediated by maleimide. Methods for utilizing cysteine mediated linkage of two moieties which can be used to produce the pMHC multimers disclosed herein have been described, for example, see Chalker et al. (2009) Chem Asian J. 4(5):630-40; Spicer et al. (2015) Nat Commun. 5:4740.

[0286] In some embodiments, the MHC multimers are produced by chemical modification of amino acids other than cysteine, including but not limited to lysine, tyrosine, arginine, glutamate, aspartate, serine, threonine, methionine, histidine and tryptophan side-chains, as well as N-terminal amines or C-terminal carboxyls, as previously described (Basle et al. (2010) M Chem Biol. 17(3):213-27; Hu et al. (2016) Chem Soc Rev. 45(6):1691-719; Lin et al. (2017) Science 355(6325):597-602).

[0287] (b) Native Chemical Ligation

[0288] In some embodiments, the pMHC multimers are produced by native chemical ligation (NCL), wherein each p*MHC polypeptide comprises a C-terminal thioester, and each subunit of the multimerization domain comprises an N-terminal cysteine residue, or functional equivalent thereof, wherein the reaction between the cysteine side-chain and the thioester irreversibly forms a native peptide bond, thus ligating the p*MHC monomers to the multimerization domain. Methods for NCL have been described (Hejjaoui et al. (2015) M Protein Sci. 24(7):1087-99; Mandal et al. (2012) Proc Natl Acad Sci USA 109(37):14779-84; Torbeev et al. (2013) Proc Natl Acad Sci USA 110(50):20051-6).

[0289] In some embodiments, β- and/or γ-thio amino acids are incorporated into the p*MHC monomers. In some embodiments, β- and/or γ-thio amino acids replace the cysteine-like residue at an N-terminal position of each subunit of the multimerization domain, e.g., to provide a reactive thiol for trans-thioesterification. Desulfurization protocols can then produce the desired native side-chain. In some embodiments, NCL is performed at an alanine residue. In other embodiments, NCL is performed at phenylalanine (Crich & Banerjee, 2007), valine (Chen et al. 2008; Haase et al. 2008), leucine (Harpaz et al. 2010; Tan et al. 2010), threonine (Chen et al. 2010b), lysine (El Oualid et al. 2010; Kumar et al. 2009; Yang et al. 2009), proline (Shang et al. 2011), glutamine (Siman et al. 2012), arginine (Malins et al. 2013), tryptophan (Malins et al. 2014), aspartate (Thompson et al. 2013), glutamate (Cergol et al. 2014) and asparagine (Sayers et al. 2015). Ligation/desulfurization approaches that remove purification steps and increase the yield of ligated products have been described (Moyal et al. 2013; Thompson et al. 2014).

[0290] (c) Click Chemistry Mediated Bioorthogonal Conjugation

[0291] In some embodiments, the p*MHC multimers are produced by bioorthogonal conjugation between the conjugation moiety at the C-terminus of each p*MHC monomer and the conjugation moiety at the N-terminus of each subunit of the multimerization domain. In some embodiments, the biorthogonal conjugation is mediated by “click chemistry.” (see, e.g., Kolb et al. (2001) Angewandte Chemie International Edition 40: 2004-2021). Conjugation moieties suitable for click chemistry, reaction conditions, and associated methods are available in the art (e.g., Kolb et al. (2001) Angewandte Chemie International Edition 40:2004-2021; Evans (2007) Australian Journal of Chemistry 60: 384-395; Lahann, Click Chemistry for Biotechnology and Materials Science, John Wiley & Sons Ltd, ISBN 978-0-470-69970-6, 2009). In some embodiments, a click chemistry moiety may comprise or consist of a terminal alkyne, azide, strained alkyne, diene, dieneophile, alkoxyamine, carbonyl, phosphine, hydrazide, thiol, or alkene moiety. In certain embodiments, the azide is a copper-chelating azide. In one embodiment, the copper-chelating azide is a picolyl azide, such as Gly-Gly-Gly-(PEG)4-Picolyl-Azide. Reagents for use in click chemistry reactions are commercially available, such as from Click Chemistry Tools (Scottsdale, Ariz.) or GenScript (Piscataway, N.J.).

[0292] For conjugation of each p*MHC monomer to a subunit of the multimerization domain via click chemistry, the click chemistry moieties of the proteins have to be reactive with each other, for example, in that the reactive group of one of the click chemistry moiety of each p*MHC monomer reacts with the reactive group of the second click chemistry moiety on a subunit of the multimerization domain to form a covalent bond. Such reactive pairs of click chemistry handles are well known to those of skill in the art and include but are not limited to those set forth in FIG. 1.

[0293] In some embodiments, each p*MHC conjugation moiety can be covalently conjugated under click chemistry reaction conditions to the conjugation moiety of each subunit of the multimerization domain. In some embodiments a sortase-mediated conjugation is used to install a first click chemistry moiety at the C-terminus of each p*MHC monomer, and a second click chemistry moiety reaction to each subunit of the multimerization domain. In the methods provided herein, two or more p*MHC monomers containing the first click chemistry moiety are conjugated to the second click chemistry moiety at the C-terminus of each subunit of the multimerization domain under click chemistry conditions. Methods of attaching click chemistry moieties utilizing sortase are described, for example, in WO2013/00355, the entire contents of which is hereby incorporated by reference. Non-limiting exemplifications of pMHC multimers prepared using Alkyne-Azide click chemistry in combination with sortase-mediated conjugation are described in detail in Examples 1, 5, 6 and 7.

[0294] In some embodiments, an intein-mediated conjugation is used to install a first click chemistry moiety at the C-terminus of each p*MHC monomer, and a second click chemistry moiety reaction to each subunit of the multimerization domain. Methods of utilizing intein-mediated conjugated are described further herein.

[0295] In some embodiments, the methods of click chemistry mediated covalent conjugation of the p*MHC monomers to the multimerization domain provided herein comprise native chemical ligation of C-terminal thioesters with β-amino thiols (Xiao J et al. (2009) Org Lett. 11(18):4144-7).

[0296] In some embodiments, the click chemistry used to produce the p*MHC multimers comprises 1,3-dipolar cycloaddition (e.g., the Cu(I)-catalyzed stepwise variant, often referred to simply as the “click reaction”; see, e.g., Tornoe et al. (2002) Journal of Organic Chemistry 67: 3057-3064). Copper and ruthenium are the commonly used catalysts in the reaction. The use of copper as a catalyst results in the formation of 1,4-regioisomer whereas ruthenium results in formation of the 1,5-regioisomer.

[0297] In some embodiments, the MHC monomers are ligated to an alkynated peptide by expressed protein ligation (EPL) and then conjugated to an azide-labeled multimerization domain by Cu(I)-catalyzed terminal azide-alkyne cycloaddition (CuAAC).

[0298] In some embodiments, the click chemistry conjugation comprises a cycloaddition reaction, such as the Diels-Alder reaction. In some embodiments, the MHCI and multimerization domain are conjugated by azide-alkyne 1,3-dipolar cycloaddition (“click chemistry). In some embodiments, the cycloaddition is promoted by the presence of Cu(I)-catalyzed cycloaddition (CuAAC).

[0299] In some embodiments, the click chemistry conjugation comprises nucleophilic addition to small strained rings like epoxides and aziridines. In some embodiments, the cycloaddition is promoted by strained cyclooctyne systems, for example, as described in Agard et al. (2004) J. Am Chem Soc. 126(46): 15046-7.

[0300] In some embodiments, the click chemistry conjugation comprises nucleophilic addition to activated carbonyl groups.

[0301] In some embodiments, the conjugation of the pMHC monomers and multimerization domain occurs by a bioorthogonal reaction. In some embodiments, the MHC and multimerization domain are conjugated by inverse-electron demand Diels-Alder reactions between strained dienophiles and tetrazine dienes, for example, as described in Blackman et al. (2008) J. Am Chem Soc. 130(41):13518-9; and Devaraj et al. (2008) Bioconjug Chem. 19(12):2297-9). In some embodiments, the dienophile is a trans-cyclooctene. In some embodiments, the dienophile is a norbornene.

[0302] (d) Sortase Mediated Conjugation

[0303] In some embodiments, conjugation between the p*MHC monomers and the multimerization domain is mediated by a cysteine transpeptidase. In some embodiments, the cysteine transpeptidase is a sortase, or enzymatically active fragment thereof. A variety of sortase enzymes have been described and are commercially available (e.g., Antos et al. (2016) Curr. Opin. Struct. Biol. 38:111-118. Sortases recognize and cleave an amino acid motif, referred to as a “sortag”, to produce a peptide bond between the acyl donor and acceptor site on two polypeptides, resulting in the ligation of different polypeptides which contain N- or C-terminal sortags. Non-limiting exemplifications of pMHC multimers prepared using sortase-mediated conjugation (in combination with Alkyne-Azide click chemistry) are described in detail in Examples 1, 5, 6 and 7.

[0304] Accordingly, in some embodiments, each p*MHC monomer comprises a C-terminal sortag, and each subunit of the multimerization domain comprises an C-terminal sortag. In some embodiments, the sortase catalyzes the formation of a peptide bond between an MHC polypeptide and each of the subunits of the multimerization domain.

[0305] In some embodiments, the recognition motif is added to the C-terminus of each of the pMHC monomers, and an oligo-glycine motif is added to the C-terminus of each of the subunits of the multimerization domain. Upon addition of sortase to the mixture of MHC monomers and multimerization domains, the polypeptides are covalently linked through a native peptide bond to produce a pMHC multimer.

[0306] In some embodiments, the MHC monomers and/or multimerization domain are expressed in frame with the sortags. In some embodiments, additional tags may be included, for example, a 6×-His tag (Sinisi et al. (2012) Bioconjug. Chem 23:1119-1126), a nucleophilic fluorochrome (Nair et al. (2013) Immun. Inflamm. Dis. 1:3-13), and/or a FLAG tag (Greineder et al. (2018) Bioconjug. Chem. 29:56-66).

[0307] In some embodiments, the sortag contains a modified amino acid suitable for chemical conjugation between the MHC monomers and the multimerization domain. In some embodiments, the sortag contains a C-terminal azidolysine residue to enable oriented click-click chemistry conjugation as described herein.

[0308] In some embodiments, the MHC polypeptide and/or multimerization domains comprise a linker between the polypeptide and the sortag. In some embodiments, each MHC polypeptide and each subunit of the multimerization domain comprises a sortag with a linker. Suitable linkers have been described, for example, in Greineder et al. (2018) Bioconjug. Chem. 29:56-66. In some embodiments, the linker is a semi-rigid linker. In some embodiments, the linker comprises (SSSSG)₂SAA (SEQ ID NO: 182). In some embodiments, the linker comprises (G)₅ (SEQ ID NO: 183).

[0309] In some embodiments, the sortag contains a fluorophore-modified lysine residue to facilitate measurement of reaction progression and efficiency

[0310] In some embodiments, the sortase is Ca2+ dependent. In some embodiments, the sortase is Ca2+ independent.

[0311] In some embodiments, the sortag-labeled MHC molecule is a soluble HLA-A2 molecule (HLA-A*02:01) with a C-terminal sortag and 6×His tag, such as having the amino acid sequence shown in SEQ ID NO: 1. In some embodiments, the sortag-labeled multimerization domain is a streptavidin molecule with a C-terminal sortag and 6×His Tag, such as having the amino acid sequence shown in SEQ ID NO: 3. In some embodiments, the sortag label with a 6×His tag has the amino acid sequence shown in SEQ ID NO: 162. Various other sortag sequences are known in the art and are suitable for use in preparing the Conjugated Multimers of the disclosure, non-limiting examples of which are described further below.

[0312] In some embodiments, the sortag comprises the amino acid sequence LPXTG (SEQ ID NO: 163), wherein X is any amino acid, and the sortase cleaves between the threonine and glycine backbone within the motif.

[0313] In some embodiments, the sortase recognizes a sortag comprising an amino acid sequence selected from IPKTG (SEQ ID NO:164), MPXTG (SEQ ID NO:165), LAETG (SEQ ID NO:166), LPXAG (SEQ ID NO:167), LPELG (SEQ ID NO:168), LPELG (SEQ ID NO:169) or LPEVG (SEQ ID NO:170).

[0314] In some embodiments, the sortase is a SrtAstaph mutant. In some embodiments, the SrtAstaph mutant is F40, and the recognition motif is XPKTG (SEQ ID NO: 171) (Piotukh et al. (2011) J. Am. Chem. Soc. 133:17536-17539). In some embodiments, the SrtAstaph mutant is F40 and the recognition motif is APKTG (SEQ ID NO:172), DPKTG (SEQ ID NO:173) or SPKTG (SEQ ID NO:174).

[0315] In some embodiments, the SrtAstaph mutant is SrtAstaph pentamutant and the recognition motif is LPXTG (SEQ ID NO:163), wherein X is any amino acid, LPEXG, (SEQ ID NO:175), wherein X is any amino acid, or LAETG (SEQ ID NO:166). In some embodiments, the mutant is SrtAstaph pentamutant and the recognition motif is LPEAG (SEQ ID NO:176), LPECG (SEQ ID NO:177) or LPESG (SEQ ID NO:168). In some embodiments, the SrtAstaph mutant is 2A-9 and the recognition motif is LAETG (SEQ ID NO:166). In some embodiments, the SrtAstaph mutant is 4S-9 and the recognition motif is LPEXG (SEQ ID NO:178), wherein X=A, C or S).

[0316] In some embodiments, the sortase is a soluble fragment of the wild-type sortase. In some embodiments, the sortase is a soluble fragment of a modified sortase A (Mao et al. (2004) J Am Chem Soc. 126(9):2670-1 A).

[0317] In some embodiments, the sortase is a variant or homolog of S. aureus sortase A (Antos et al. (2016) Curr Opin Struct Biol. 38:111-8; Don et al. (2014) Proc Natl Acad Sci USA. 111(37):13343-8; Glasgow et al. (2016) J Am Chem Soc. (24):7496-9).

[0318] Methods of conjugation of sortags into proteins have also been described. (Matsumoto et al. (2016) ACS Synth Biol. 5(11):1284-1289; Williams et al. (2016) PLoS One. 11(4):e0154607; and Witte et al. (2012) Proc Natl Acad Sci USA. 109(30):11993-8; Mao et al. (2004) JAm Chem Soc. 126(9):2670-1; Guimaraes et al. (2012) Nat Protoc. 8(9):1787-99 and Theile et al. (2013) NatProtoc. 8(9):1800-7.)

[0319] In some embodiments, the aminoglycine peptide fragment generated by the sortase reaction, is removed by dialysis or centrifugation, e.g., while the reaction is proceeding (Freiburger et al. (2015) Biomol NMR. 63(1):1-8). In some embodiments, affinity immobilization strategies or flow-based platforms are used for the selective removal of reaction components (Policarpo et al. (2014) Angew Chem Int Ed Engl. 53(35):9203-8).

[0320] In some embodiments, the equilibrium of the reaction can be controlled by ligation product or by-product deactivation. For example, in some embodiments the reaction is controlled by ligation of a WTWTW (SEQ ID NO: 179) motif added to the donor and acceptor as described in Yamamura et al. (2011) Commun (Camb). 47(16):4742-4). In other embodiments, by-products are deactivated by chemical modification of the acyl donor glycine as described, for example, in Liu et al. (2014) J Org Chem. 79(2):487-92; and Williamson et al. (2014) NatProtoc. 9(2):253-62).

[0321] (e) Intein-Mediated Conjugation

[0322] Inteins are naturally occurring, self-splicing protein subdomains that are capable of excising out their own protein subdomain from a larger protein structure while simultaneously joining the two formerly flanking peptide regions (“exteins”) together to form a mature host protein. Intein-based methods of protein modification and ligation have been developed. An intein is an internal protein sequence capable of catalyzing a protein splicing reaction that excises the intein sequence from a precursor protein and joins the flanking sequences (N- and C-exteins) with a peptide bond. A non-limiting exemplification of pMHC multimers prepared using intein-mediated conjugation is described in detail in Example 2.

[0323] As used herein, the term “split intein” refers to any intein in which one or more peptide bond breaks exists between the N-terminal intein segment and the C-terminal intein segment such that the N-terminal and C-terminal intein segments become separate molecules that cannon-covalently reassociate, or reconstitute, into an intein that is functional for splicing or cleaving reactions. Any catalytically active intein, or fragment thereof, may be used to derive a split intein for use in the systems and methods disclosed herein. For example, in one aspect the split intein may be derived from a eukaryotic intein. In another aspect, the split intein may be derived from a bacterial intein. In another aspect, the split intein may be derived from an archaeal intein. Preferably, the split intein so-derived will possess only the amino acid sequences essential for catalyzing splicing reactions.

[0324] As used herein, the “N-terminal intein segment” refers to any intein sequence that comprises an N-terminal amino acid sequence that is functional for splicing and/or cleaving reactions when combined with a corresponding C-terminal intein segment. An N-terminal intein segment thus also comprises a sequence that is spliced out when splicing occurs. An N-terminal intein segment can comprise a sequence that is a modification of the N-terminal portion of a naturally occurring (native) intein sequence. For example, an N-terminal intein segment can comprise additional amino acid residues and/or mutated residues so long as the inclusion of such additional and/or mutated residues does not render the intein non-functional for splicing or cleaving. Preferably, the inclusion of the additional and/or mutated residues improves or enhances the splicing activity and/or controllability of the intein. Non-intein residues can also be genetically fused to intein segments to provide additional functionality, such as the ability to be affinity purified or to be covalently immobilized.

[0325] As used herein, the “C-terminal intein segment” refers to any intein sequence that comprises a C-terminal amino acid sequence that is functional for splicing or cleaving reactions when combined with a corresponding N-terminal intein segment. In one aspect, the C-terminal intein segment comprises a sequence that is spliced out when splicing occurs. In another aspect, the C-terminal intein segment is cleaved from a peptide sequence fused to its C-terminus. A C-terminal intein segment can comprise a sequence that is a modification of the C-terminal portion of a naturally occurring (native) intein sequence. For example, a C terminal intein segment can comprise additional amino acid residues and/or mutated residues so long as the inclusion of such additional and/or mutated residues does not render the C-terminal intein segment non-functional for splicing or cleaving.

[0326] Expressed protein ligation (EPL) refers to a native chemical ligation between a recombinant protein with a C-terminal thioester and a second agent with an N-terminal cysteine. The C-terminal thioester can readily be introduced onto any recombinant protein (i.e., the targeting ligand) through the use of auto-processing, also known as protein-splicing, mediated by an intein (intervening protein). Inteins are proteins that can excise themselves from a larger precursor polypeptide chain, utilizing a process that results in the formation of a native peptide bond between the flanking extein (external protein) fragments. When an auto-processing protein is cloned downstream of the targeting ligand, thiols (e.g., 2-mercaptoethanesulfonic acid, MESNA) can be used to induce the site-specific cleavage of the auto-processing protein, resulting in the formation of a reactive thioester. The thioester will then react with any agent that has an N-terminal cysteine. EPL operates in a site-specific manner, and the reaction is known to be very efficient if both functional groups are in high concentrations. (reviewed in Elias et al. (2010) Small 6:2460-2468).

[0327] Accordingly, in some embodiments, the MHC monomers are ligated to an alkynated peptide by expressed protein ligation (EPL) and then conjugated to an azide-labeled multimerization domain by Cu(I)-catalyzed terminal azide-alkyne cycloaddition (CuAAC).

[0328] In some embodiments, the MHC monomers are conjugated to the multimerization domain by an intein peptide tag. In some embodiments, the MHC polypeptide comprises a C-terminal thioester, the multimerization domain comprises an N-extein fused to a modified intein lacking the ability to perform trans-esterification and trans-esterification occurs by the addition of exogenous thiol.

[0329] A number of inteins have now been described including, but not limited to MxeGyrA (Frutos et al. (2010); Southworth et al. (1999); SspDnaE (Shah et al. (2012); Wu et al. (1998); NpuDnaE (Shah et al. (2012); Vila-Perello et al. (2013); AvaDnaE (David et al. (2015); Shah et al. (2012); Cfa (consensus DnaE split intein) (Stevens et al. (2016)); gp41-1 and gp41-8 (Carvajal-Vallejos et al. (2012)); NrdJ-1 (Carvajal-Vallejos et al. (2012)); IMPDH-1 (Carvajal-Vallejos et al.) and AceL-TerL (Thiel et al. (2014). The properties and use of these inteins are summarized in TABLE 7.

TABLE 7
Inteins used for creating protein conjugates

| Intein | Temperature (° C.) | t_{1/2}* | |
|---|---|---|---|
| MxeGyrA | 25 | 10 | h |
| SspDnaE | 37 | 76 | min |
| NpuDnaE | 37 | 19 | s |
| AvaDnaE | 37 | 23 | s |
| Cfa (consensus DnaE split intein) | 30 | 20 | s |
| gp41-1 | 45 | 4 | s |
| gp41-8 | 37 | 15 | s |
| NrdJ-1 | 37 | 7 | s |
| IMPDH-1 | 37 | 8 | s |
| AceL-TerL | 8 | 7.2 | min |

[0330] In some embodiments, the intein is the 198-residue gyrase A intein from Mycobacterium xenopi (Mxe GyrA) (Southworth et al. (1999) Biotechniques. 27(1):110-4, 116, 118-20). In some embodiments, the intein is from cyanobacterium Synechocystis sp. strain PCC6803 (Ssp).

[0331] In some embodiments, the intein is a split intein pair. In some embodiments, the split intein pair is an orthogonal split intein pair (Carvajal-Vallejos et al. (2012) J Biol Chem. 287(34):28686-96; Shah et al. (2011) Angew Chem Int Ed Engl. 50(29):6511-5).

[0332] In some embodiments, the split intein pair is an artificially split intein pair that are as short as six or eleven residues (Appleby et al. (2009) J Biol Chem. 284(10):6194-9; Ludwig et al. (2006) Angew Chem Int Ed Engl. 45(31):5218-21).

[0333] In some embodiments, the intein is a DnaE intein. In some embodiments, the DnaE intein is from Nostoc punctiforme (Npu). In some embodiments, the intein is the gp41-1 intein. In some embodiments, the intein is the gp41-8 intein. In some embodiments, the intein is the IMPDH-1 intein. In some embodiments, the intein is the NrdJ Intein.

[0334] In some embodiments, the split intein pair is AceL-TerL (Thiel et al. (2014) Angew Chem Int Ed Engl. 53(5): 1306-10).

[0335] In some embodiments, the intein comprises consensus split intein sequence (Cfa) (Stevens et al. (2016) Journal of the American Chemical Society 138(7):2162-2165).

[0336] A number of protocols for intein mediated conjugation are available and an exemplary method is provided herein in Example 2. Suitable intein sequences and protocols for use in protein conjugation have been described in the art, such as in Stevens et al. (2016) J Am. Chem. Soc., 138, 2162-2165; Shah et al. (2012) J. Am. Chem. Soc., 134, 11338-11341; and Vila-Perello et al., J. Am. Chem. Soc., 135, 286-292; Batjargal et al. (2015) J. Am Chem Soc. 137(5):1734-7; and Guan et al. (2013) Biotechnol Bioeng. 110(9):2471-81, the entire contents of each of which is hereby incorporated by reference.

[0337] In some embodiments, the intein-labeled MHC molecule is a soluble HLA-A2 molecule (HLA-A*02:01) with an N-intein tag, such as having the amino acid sequence shown in SEQ ID NO: 4. In some embodiments, the intein-labeled multimerization domain is a streptavidin molecule with a C-intein tag and FLAG Tag, such as having the amino acid sequence shown in SEQ ID NO: 5. In some embodiments, the N-intein tag, including a FLAG tag, has the amino acid sequence shown in SEQ ID NO: 180. Various other N-intein and C-intein sequences are known in the art and are suitable for use in preparing the Conjugated Multimers of the disclosure, non-limiting examples of which are described in the references cited above.

[0338] (f) Peptide Linkers

[0339] In other embodiments, the p*MHC multimers comprises a peptide linker. The term “peptide linker” denotes a linear amino acid chain of natural and/or synthetic origin. The linker has the function to ensure that polypeptides conjugated to each other can perform their biological activity by allowing the polypeptides to fold correctly and to be presented properly. The peptide linker may contain repetitive amino acid sequences or sequences of naturally occurring polypeptides. In some embodiments, the peptide linker has a length of from 2 to 50 amino acids. In some embodiments, the peptide linker is between 3 and 30 amino acids, between 5 to 25 amino acids, between 5 to 20 amino acids, or between 10 and 20 amino acids.

[0340] In some embodiments, the peptide linker is rich in glycine, glutamine, and/or serine residues. These residues are arranged e.g. in small repetitive units of up to five amino acids. This small repetitive unit may be repeated for one to five times. At the amino- and/or carboxy-terminal ends of the multimeric unit up to six additional arbitrary, naturally occurring amino acids may be added. Other synthetic peptidic linkers are composed of a single amino acid, which is repeated between 10 to 20 times and may comprise at the amino- and/or carboxy-terminal end up to six additional arbitrary, naturally occurring amino acids. All peptidic linkers can be encoded by a nucleic acid molecule and therefore can be recombinantly expressed. As the linkers are themselves peptides, the polypeptide connected by the linker are connected to the linker via a peptide bond that is formed between two amino acids.

[0341] Suitable peptide linkers are well known in the art, and are disclosed in, e.g., US2010/0210511, US2010/0179094, and US2012/0094909, which are herein incorporated by reference in its entirety. Other linkers are provided, for example, in U.S. Pat. No. 5,525,491; Alfthan et al. (1995) Protein Eng., 8:725-731; Shan et al. (1999) J. Immunol. 162:6589-6595; Newton et al. (1996) Biochemistry 35:545-553; Megeed et al. (2006) Biomacromolecules 7:999-1004; and Perisic et al. (1994) Structure 12:1217-1226; each of which is incorporated by reference in its entirety.

[0342] In some embodiments, the polypeptide linker is synthetic. As used herein, the term “synthetic” with respect to a polypeptide linker includes peptides (or polypeptides) which comprise an amino acid sequence (which may or may not be naturally occurring) that is linked in a linear sequence of amino acids to a sequence (which may or may not be naturally occurring) to which it is not naturally linked in nature. For example, the polypeptide linker may comprise non-naturally occurring polypeptides which are modified forms of naturally occurring polypeptides (e.g., comprising a mutation such as an addition, substitution or deletion) or which comprise a first amino acid sequence (which may or may not be naturally occurring). Polypeptide linkers may be employed, for instance, to ensure that the binding portion (TCR or MHC), the multimerization domain and the Igg-Framework of each multimeric fusion polypeptide is juxtaposed to ensure proper folding and formation of a functional multimeric protein complex. Preferably, a polypeptide linker will be relatively non-immunogenic and not inhibit any non-covalent association among monomer subunits of a binding protein.

[0343] In some embodiments, the linker is a Gly-Ser polypeptide linker, i.e., a peptide that consists of glycine and serine residues. One exemplary Gly-Ser polypeptide linker comprises the amino acid sequence (Gly4Ser)n, wherein n=1-6 (SEQ ID NO: 181). In certain embodiments, n=1. In certain embodiments, n=2. In certain embodiments, n=3. In certain embodiments, n=4. In certain embodiments, n=5. In certain embodiments, n=6. Another exemplary Gly-Ser polypeptide linker comprises the amino acid sequence Ser(Gly4Ser)n, wherein n=1-10 (SEQ ID NO: 184). In certain embodiments, n=1. In certain embodiments, n=2. In certain embodiments, n=3, i.e., Ser(Gly4Ser)3. In certain embodiments, n=4, i.e., Ser(Gly4Ser)4. In certain embodiments, n=5. In certain embodiments, n=6. In certain embodiments, n=7. In certain embodiments, n=8. In certain embodiments, n=9. In certain embodiments, n=10.

[0344] Other exemplary linkers include GS linkers (i.e., (GS)n), GGSG linkers (i.e., (GGSG)n) (SEQ ID NO: 185), GSAT linkers (SEQ ID NO: 186), SEG linkers, and GGS linkers (i.e., (GGSGGS)n) (SEQ ID NO: 187), wherein n is a positive integer (e.g., 1, 2, 3, 4, or 5). Other suitable linkers for use in multimeric fusion proteins can be found using publicly available databases, such as the Linker Database (ibi.vu.nl/programs/linkerdbwww). The Linker Database is a database of inter-domain linkers in multi-functional enzymes which serve as potential linkers in novel multimeric fusion proteins (see, e.g., George et al. (2002) Protein Engineering 15:871-9).

[0345] Polypeptide linkers can be introduced into polypeptide sequences using techniques known in the art. Modifications can be confirmed by DNA sequence analysis. Plasmid DNA can be used to transform hos T cells for stable production of the polypeptides produced.

[0346] (g) Additional Peptide Linkers and Tags

[0347] Additional tags suitable for use in the methods and compositions provided herein include affinity tags, including but not limited to enzymes, protein domains, or small polypeptides which bind with high specificity to a range of substrates, such as carbohydrates, small biomolecules, metal chelates, antibodies, etc. to allow rapid and efficient purification of proteins. Solubility tags enhance proper folding and solubility of a protein and are frequently used in tandem with affinity tags.

[0348] Small-size tags which include, but are not limited to, 6×His, FLAG, Strep II and Calmodulin-binding peptide (CBP) tag, have the benefits of minimizing the effect on structure, activity and characteristics of the MHC polypeptide (Zhao et al. (2013) J Anal. Chem. 581093).

[0349] In some embodiments, the tag is a FLAG tag. The FLAG tag is a hydrophilic octapeptide epitope tag that binds to several specific anti-FLAG monoclonal antibodies such as M1, M2, and M5 with different recognition and binding characteristics (Einhauer et al. (2001) J. Biochem. Biophys. 49:455-465: Hopp et al. (1996) Mol. Immunol. 33:601-608). FLAG fusion proteins can be recognized by monoclonal antibody with calcium-dependent (e.g., M2) or calcium-independent manner. In particular, the tag appended to the N-terminus of the fusion protein is necessary for the immunoaffinity purification with M1 monoclonal antibody, while M2 is position-insensitive.

### MHC Peptide Epitopes

[0350] (a) Peptide Epitope Selection

[0351] Various processes have been developed for identifying new MHC binding peptides that may be T cell epitopes and many experimental methods start with constructing an overlapping library of peptide fragments from a given protein sequence, by synthesizing a constant length (n-mer) amino acid sequences which are offset from one another along the protein sequence by fixed number of amino acids. The MHC binding properties and potential for activating T cells of each sequence can then be assessed in a number of assays.

[0352] Existing MHC binding peptides that have been identified with the methods outlined above and other methods, such as crystallographic analysis of the conformation of and charge distribution in the MHC binding groove has led to binding motifs being defined for the most common MHC alleles, setting rules for what type of putative MHC binding peptide can actually bind well to MHC molecules of a given allele. These motifs have been translated into predictive computer algorithms for predicting peptide binding to MHC molecules such as the SYFPEITHI algorithm (Rammensee H.-G., et al. (1995) Immunogenetics 41:178-228).

[0353] Protein sequences for the desired antigen are analyzed for potential HLA specific antigens by using the SYFPEITHI algorithm (Rammensee et al. (1999) Immunogenetics 50:213-219), and the artificial neural network (ANN) and stabilized matrix method (SMM) algorithms from IEDB (Peters et al. (2005) PLoS Biol. 3:e91). Peptides are selected based on a predicted binding value of either >21 for SYFPEITHY, <6000 for ANN, or <600 for SMM. Selected peptides are synthesized.

[0354] Binding assays can be performed using a fluorescence polarization (FP) assay as previously described (e.g., Buchi et al. (2004) Biochemistry 43:14852-14863; Sette et al. (1994)Mol. Immunol. 31:813-822). To determine binding capacity of the peptides, percentage inhibition relative to controls can be determined in an FP competition assay with the placeholder peptide.

[0355] In some embodiments, the peptides bound to the pMHC multimers are from an unbiased library of peptides. In some embodiments, the peptides are 9-mers. In some embodiments, the peptides bound to the pMHCI multimers are 9-mers which include an HLA-A2 binding motif with key amino acids at positions 2 and 9 which can include isoleucine (I), valine (V) or leucine (L).

[0356] In some embodiments, the library comprises all k-mer peptides produced by transcription and translation of any polynucleotide sequence of interest, for example, in silico production of the transcription and translation products of both the forward and reverse strands of a genome or metagenome in all six reading frames.

[0357] In some embodiments, a library of the disclosure comprises all k-mer peptides that can be derived from in silico translation of an exome of interest. In some embodiments, a library of the disclosure comprises all k-mer peptides that can be derived from in silico translation of a transcriptome of interest. In some embodiments, a library of the disclosure comprises all k-mer peptides that can be derived from a proteome of interest. In some embodiments, a library of the disclosure comprises all k-mer peptides that can be derived from in silico translation of an ORFeome of interest. In some embodiments, an algorithm can be used to select peptides in a peptide library. For example, an algorithm can be used to predict peptides most likely to fold or dock in an MHC/HLA binding pocket, and peptides above a certain threshold value can be selected for inclusion in the library.

[0358] In some embodiments, a library of the disclosure comprises all peptides that can be derived from in silico transcription and translation or translation of a group of genomes, proteomes, transcriptomes, ORFeomes, or any combination thereof. In some embodiments, the peptides are derived from in silico transcription and translation or translation of polynucleotide sequences from a group of samples, for example, clinical samples from a patient population, or a group of pathogen genomes.

[0359] In some embodiments, the peptides are derived from a differential genome, proteome, transcriptome, ORFeome, or any combination thereof, where two or more genomes, proteomes, transcriptomes, ORFeomes, or a combination thereof are compared to identify sequences that are differential sequences (e.g., that differ between them). In some embodiments, the peptide sequences are identified by comparing tissues of interest. In some embodiments, the peptide sequences are identified by comparing cells of interest. In some embodiments, the peptide sequences are identified by comparing diseased versus healthy cells or tissues. In some embodiments, the diseased cells or tissues are cancer cells or tissues. In some embodiments, the diseased cells are derived from an individual with an autoimmune disorder.

[0360] In some embodiments, the peptides are derived from homologous sequences of genomes, proteomes, transcriptomes, ORFeomes, or any combination thereof, where two or more genomes, proteomes, transcriptomes, ORFeomes, or a combination thereof are compared to identify sequences that are homologous sequences.

[0361] In some embodiments, the peptides are derived from mutations in a sequence of interest, for example, all 9-mer peptides that can be generated from single nucleotide mutations in a polynucleotide sequence encoding an antigen or epitope.

[0362] In some embodiments, the peptides an overlapping peptide library, comprising overlapping peptides from a template sequence (e.g., in silico translated genome), wherein overlapping peptides of a set length are offset by a defined number of residues.

[0363] In some embodiments, selection of peptides comprises prioritizing peptides based on predicted binding affinity for a certain HLA type.

[0364] In some embodiments, selection of peptides for a library of the disclosure prioritizes HLA types or alleles based on prevalence in a population, e.g., a human population.

[0365] In some embodiments, the library comprises all k-mer peptides produced by transcription and translation of any polynucleotide sequence of interest, for example, in silico production of the transcription and translation products of both the forward and reverse strands of a genome or metagenome in all six reading frames. In some embodiments, a library of the disclosure comprises all k-mer peptides that can be derived from in silico transcription and translation of a mammalian genome, for example, a mouse genome, a human genome, a patient genome, an autoimmune patient genome, or a cancer genome. In some embodiments, a library of the disclosure comprises all k-mer peptides that can be derived from in silico transcription and translation of a microorganism genome, for example, a bacterial genome, a viral genome, a protozoan genome, a protist genome, a yeast genome, an archaeal genome, or a bacteriophage genome. In some embodiments, a library of the disclosure comprises all k-mer peptides that can be derived from in silico transcription and translation of a pathogen genome, for example, a bacterial pathogen genome, a viral pathogen genome, a fungal pathogen genome, an opportunistic pathogen genome, a conditional pathogen genome, or a eukaryotic parasite genome. In some embodiments, a library of the disclosure can be derived from a plant genome or a fungal genome. In some embodiments, a library of the disclosure comprises k-mer peptides derived from in silico transcription and translation of a genome, wherein the genome is modified during in silico transcription and translation, for example, in silico mutated to produce k-mer peptides comprising mutations (e.g. substitutions, insertions, deletions).

[0366] In some embodiments, a library of the disclosure comprises all k-mer peptides that can be derived from in silico translation of an exome of interest, for example, a mammalian exome, a human exome, a mouse exome, a patient exome, an autoimmune patient exome, a cancer exome, a viral exome, a protozoan exome, a protist exome, a yeast exome, a pathogen exome, a eukaryotic parasite exome, a plant exome, or a fungal exome. In some embodiments, a library of the disclosure comprises k-mer peptides derived from in silico translation of a exome, wherein the exome is modified during in silico translation, for example, in silico mutated to produce k-mer peptides comprising mutations (e.g. substitutions, insertions, deletions).

[0367] In some embodiments, a library of the disclosure comprises all k-mer peptides that can be derived from in silico translation of a transcriptome of interest, for example, a mammalian transcriptome, a human transcriptome, a mouse transcriptome, a patient transcriptome, an autoimmune patient transcriptome, a cancer transcriptome, a microorganism transcriptome, a bacterial transcriptome, a viral transcriptome, a protozoan transcriptome, a protist transcriptome, a yeast transcriptome, an archaeal transcriptome, a bacteriophage transcriptome, a pathogen transcriptome, a eukaryotic parasite transcriptome, a plant transcriptome, a fungal transcriptome, a transcriptome derived from RNA sequencing, a microbiome transcriptome, or a transcriptome derived from metagenomic RNA-sequencing. In some embodiments, a library of the disclosure comprises k-mer peptides derived from in silico translation of a transcriptome, wherein the transcriptome is modified during in silico translation, for example, in silico mutated to produce k-mer peptides comprising mutations (e.g. substitutions, insertions, deletions).

[0368] In some embodiments, a library of the disclosure comprises all k-mer peptides that can be derived from a proteome of interest, for example, a mammalian proteome, a human proteome, a mouse proteome, a patient proteome, an autoimmune patient proteome, a cancer proteome, a microorganism proteome, a bacterial proteome, a viral proteome, a protozoan proteome, a protist proteome, a yeast proteome, an archaeal proteome, a bacteriophage proteome, a pathogen proteome, a eukaryotic parasite proteome, a plant proteome or a fungal proteome. In some embodiments, a library of the disclosure comprises k-mer peptides derived from a proteome wherein the k-mer peptides are modified from the proteome sequence, for example, k-mer peptides comprising mutations (e.g. substitutions, insertions, deletions).

[0369] In some embodiments, a library of the disclosure comprises all k-mer peptides that can be derived from in silico translation of an ORFeome of interest, for example, a mammalian ORFeome, a human ORFeome, a mouse ORFeome, a patient ORFeome, an autoimmune patient ORFeome, a cancer ORFeome, a microorganism ORFeome, a bacterial ORFeome, a viral ORFeome, a protozoan ORFeome, a protist ORFeome, a yeast ORFeome, an archaeal ORFeome, a bacteriophage ORFeome, a pathogen ORFeome, a eukaryotic parasite ORFeome, a plant ORFeome or a fungal ORFeome, an ORFeome derived from next-gen sequencing, a microbiome ORFeome, or an ORFeome derived from metagenomic sequencing. In some embodiments, a library of the disclosure comprises k-mer peptides derived from in silico translation of an ORFeome, wherein the ORFeome is modified during in silico translation, for example, in silico mutated to produce k-mer peptides comprising mutations (e.g. substitutions, insertions, deletions).

[0370] In some embodiments, a library of the disclosure comprises all k-mer peptides that can be derived from in silico transcription and translation or translation of a group of genomes, proteomes, transcriptomes, ORFeomes, or any combination thereof. In some embodiments, a library of the disclosure comprises all k-mer peptides that can be derived from in silico transcription and translation or translation of polynucleotide sequences from a group of samples, for example, clinical samples from a patient population, or a group of pathogen genomes. In some embodiments, a library of the disclosure comprises all k-mer peptides that can be derived from in silico transcription and translation of a group of viral genomes, for example, the human virome. In some embodiments, a library of the disclosure comprises all k-mer peptides that can be derived from in silico transcription and translation of a group of genomes, proteomes, transcriptomes, ORFeomes, or any combination thereof, wherein the source sequences are modified during in silico translation, for example, in silico mutated to produce k-mer peptides comprising mutations (e.g. substitutions, insertions, deletions).

[0371] In some embodiments, a library of the disclosure comprises all k-mer peptides that can be derived from a differential genome, proteome, transcriptome, ORFeome, or any combination thereof, where two or more genomes, proteomes, transcriptomes, ORFeomes, or a combination thereof are compared to identify sequences that are differential sequences (e.g., that differ between them), for example, differing in nucleotide sequence, amino acid sequence, nucleotide abundance, or protein abundance. In some embodiments, differential sequences of a genome, proteome, transcriptome, or ORFeome are generated by comparing tissues of interest. In some embodiments, differential sequences of a genome, proteome, transcriptome, or ORFeome are generated by comparing sequences from cells of interest (e.g., a healthy cell versus a cancer cell). In some embodiments, differential sequences of a genome, proteome, transcriptome, or ORFeome are generated by comparing sequences of organisms of interest. In some embodiments, differential sequences of a genome, proteome, transcriptome, or ORFeome can be generated by comparing subjects of interest (e.g., diseased versus healthy subjects).

[0372] In some embodiments, a library of the disclosure comprises all k-mer peptides that can be derived from homologous sequences of genomes, proteomes, transcriptomes, ORFeomes, or any combination thereof, where two or more genomes, proteomes, transcriptomes, ORFeomes, or a combination thereof are compared to identify sequences that are homologous sequences (e.g., that share a degree of homology), for example, homologous nucleotide sequences, homologous amino acid sequences, homologous nucleotide abundance, or homologous protein abundance. In some embodiments, homologous sequences of genomes, proteomes, transcriptomes, or ORFeomes are generated by comparing tissues of interest. In some embodiments, homologous sequences of genomes, proteomes, transcriptomes, or ORFeomes are generated by comparing sequences from cells of interest (e.g., a healthy cell versus a involved in autoimmunity cell (e.g., a cell that induces autoimmunity or a cell that is targeted during autoimmunity). In some embodiments, homologous sequences of genomes, proteomes, transcriptomes, or ORFeomes are generated by comparing sequences of organisms of interest. In some embodiments, homologous sequences of genomes, proteomes, transcriptomes, or ORFeomes are generated by comparing subjects of interest (e.g., diseased versus healthy subjects).

[0373] In some embodiments, a library of the disclosure comprises all k-mer peptides that can be derived from a polypeptide sequence of interest, for example, all possible 9-mer peptides covering the complete protein sequence of a viral protein. In some embodiments, a library of the disclosure comprises k-mer peptides that can be generated from a polypeptide sequence of interest, wherein the polypeptide sequence of interest is modified, e.g. in silico mutated to produce k-mer peptides comprising mutations (e.g. substitutions, insertions, deletions).

[0374] In some embodiments, a library of the disclosure comprises all k-mer peptides that can be derived from mutations in a sequence of interest, for example, all 9-mer peptides that can be generated from single nucleotide mutations in a polynucleotide sequence encoding an antigen or epitope. For example, a library of the disclosure comprises all 9-mer peptides that can be generated from two, three, four, five, six, seven, eight, or nine nucleotide mutations in a polynucleotide sequence encoding an antigen or epitope. In some embodiments, a library of the disclosure comprises all k-mer peptides that can be derived from alanine substitutions, for example, alanine substitutions at any position in any of the sequences described herein (e.g., a protein, a group of proteins, a proteome, an in silico transcripted and translated genome). In some embodiments, a library of the disclosure comprises a positional scanning library, wherein selected amino acid residues are sequentially substituted with all other natural amino acids. In some embodiments, a library of the disclosure comprises a combinatorial positional scanning library, wherein selected amino acid residues are sequentially substituted with all other natural amino acids, two or more positions at a time. In some embodiments, a library of the disclosure comprises an overlapping peptide library, comprising overlapping peptides from a template sequence (e.g., in silico translated genome), wherein overlapping peptides of a set length are offset by a defined number of residues. In some embodiments, a library of the disclosure comprises a T cell truncated peptide library, wherein each replicate of the library comprises equimolar mixtures of peptides with truncations at one terminus (e.g., 8-mers, 9-mers, 10-mers and 11-mers that can be derived from C-terminal truncations of a nominal 11-mer). In some embodiments, a library of the disclosure comprises a customized set of peptides, wherein the customized set of peptides are provided in a list.

[0375] (b) Peptide Production

[0376] Peptides suitable for use in the pMHC multimers are generated according to methods known in the art, or synthetically produced by a commercial vendor or using a peptide synthesizer according to manufacturer's instructions. For example, in some embodiments, peptides suitable for use in the pMHC multimers can be made by in silico production methods.

[0377] In other embodiments, peptides can be synthesized via chemical methods, for example, tea bag synthesis, digital photolithography, pin synthesis, and SPOT synthesis. For example, an array of peptides can be generated via SPOT synthesis, where amino acid chains are built on a cellulose membrane by repeated cycles of adding amino acids, and cleaving side-chain protection groups.

[0378] In other embodiments, peptides can be expressed using recombinant DNA technology, for example, introducing an expression construct into bacterial cells, insect T cells, or mammalian cells, and purifying the recombinant protein from cell extracts.

[0379] In some embodiments, peptides can be synthesized by in vitro transcription and translation, where synthesis utilizes the biological principles of transcription and translation in a cell-free context, for example, by providing a nucleic acid template, relevant building blocks (e.g., RNAs, amino acids), enzymes (e.g., RNA polymerase, ribosomes), and conditions.

[0380] In some embodiments, in vitro transcription and translation can include cell-free protein synthesis (CFPS). Obtaining a high yield by CFPS requires the usage of bacterial systems, in which the first amino acid of the translated sequence is N-formylmethionine (fMet). This residue differs from methionine by containing a neutral formyl group (HCO) instead of a positively charged amino-terminus (NH₃⁺). Constructs are engineered to include genes encoding an enzymatic cleavage domain and a library polypeptide as described in U.S. Provisional Application No. 62/791,601, hereby incorporated by reference in its entirety.

[0381] Removal of at least the initial methionine amino acid allows successful peptide folding and loading onto MHC protein. In addition, removal of the initial methionine amino acid provides a greater upper limit of peptide library diversity, e.g., 20^{x}, where x is the length of the peptide, while inclusion of this residue will restrict the library diversity to 20^{(x-1)}.

[0382] In some embodiments, the peptides are synthesized utilizing an in vitro transcription/translation (IVTT) system that can both transcribe, for example, a DNA construct into RNA, and then translate the RNA into a protein. For example, the methods of the present disclosure comprise a method for performing in vitro transcription/translation (IVTT) to produce a high diversity peptide library and allow for correct folding of proteins. IVTT can allow for protein production in a cell-free environment directly from a DNA or RNA template.

[0383] An IVTT method used herein can be performed using, for example, a PCR product, a linear DNA plasmid, a circular DNA plasmid, or an mRNA template with a ribosome-binding site (RBS) sequence. After the appropriate template has been isolated, transcription components can be added to the template including, for example, ribonucleotide triphosphates, and RNA polymerase. After transcription has been completed, translation components can be added, which can be found in, for example, rabbit reticulocyte lysate, or wheat germ extract. In some methods, the transcription and translation can occur during a single step, in which purified translation components found in, for example, rabbit reticulocyte lysate or wheat germ extract are added at the same time as adding the transcription components to the nucleic acid template.

[0384] In some embodiments, nucleotide sequence encoding a methionine residue at the N-terminus of the peptide and a cleavable moiety can be encoded in the DNA construct or RNA construct. The cleavable moiety is situated such that at least one N-terminus amino acid residue of the peptide is before or within the cleavable moiety. In some embodiments, the method comprises encoding a cleavable moiety that is situated such that one N-terminus amino acid residue of the peptide is before or within the cleavable moiety. In some embodiments, the one N-terminus amino acid residue is a methionine residue. The cleavable moiety can be cleaved using an enzyme, e.g., a protease, specific to the cleavable moiety, which can also cleave off the cleavable moiety from the remainder of the peptide.

[0385] An example of a cleavable moiety that can be encoded in a DNA or RNA construct as described herein includes any cleavable moiety cleaved by an enzyme. In some embodiments, a cleavable moiety can be cleaved by a protease. The cleavage moiety can be cleaved off of the peptide using an enzyme specific for the cleavage moiety. The enzyme can be, for example, Factor Xa, human rhinovirus 3C protease, AcTEV™ Protease, WELQut Protease, Genenase™, small ubiquitin-like modifier (SUMO) protein, Ulp1 protease, or enterokinase. The Ulp1 protease can cleave off a cleavage moiety in a specific manner by recognizing the tertiary structure, rather than an amino acid sequence. Enterokinase (enteropeptidase) can also be used to cleave the cleavage moiety from the candidate peptide.

[0386] Enterokinase can cleave after lysine at the following cleavage site: DDDDK (SEQ ID NO.: 188). Enterokinase can also cleave at other basic residues, depending on the sequence and conformation of the protein substrate.

[0387] In some embodiments, the cleavable moiety can be a small ubiquitin-like modifier (SUMO) protein. The SUMO domain can be cleaved off of the peptide using a protease specific to SUMO. In some embodiments, the cleavable moiety can be an enterokinase cleavage site: DDDDK (SEQ ID NO.: 188). The protease can be, for example, Ulp1 protease or enterokinase. The Ulp1 protease can cleave off SUMO in a specific manner by recognizing the tertiary structure of SUMO, rather than an amino acid sequence. Enterokinase (enteropeptidase) can also be used to cleave after lysine at the following cleavage site: DDDDK (SEQ ID NO.: 188). Enterokinase can also cleave at other basic residues, depending on the sequence of the protein substrate.

[0388] During or after translation of the construct encoding the peptide, the N-terminus amino acid residue(s) (e.g., a SUMO domain) can be efficiently cleaved to produce the properly folded peptide. In some embodiments, at least one N-terminus amino acid residue is cleaved to produce the peptide. In some embodiments, one, two, three, four, five six, seven, eight, nine, ten or more N-terminus amino acid residues are cleaved to produce the peptide. The N-terminus amino acid can be any amino acid residue. The N-terminus amino acid residue can be a methionine amino acid residue. This properly folded peptide is thus not constrained to have an N-terminus methionine, and can be part of a high diversity peptide library produce by cell-free in vitro methods.

[0389] After translation of the construct encoding the peptide, an N-terminus amino acid residue can be cleaved to produce the peptide for the high diversity peptide library. In some embodiments, at least one N-terminus amino acid residue is cleaved to produce the peptide. In some embodiments, one or more N-terminus amino acids are cleaved, such as 2, 3, 4, 5, 6, 7, 8, 9, 10, 11, 12, 13, 14, 15, 20, 25, 30, 35, 40, 45, 50, 55, 60, 65, 70, 75, 80, 85, 90, 95, 100, 105, 110, 115, 120, 125, 130, 140, 150, 160, 170, 180, 190, 200, 250 or more, N-terminus amino acid residues are cleaved to produce the peptide. The N-terminus amino acid can be any amino acid residue. The N-terminus amino acid residue can be a methionine amino acid residue.

[0390] In some embodiments, a DNA or RNA construct comprises a puromycin. In some embodiments, a DNA or RNA construct comprises a spacer sequence lacking a stop codon. In some embodiments, the peptides are purified by affinity tag purification (e.g., with a FLAG-tag). In some embodiments, the peptides comprise a HaloTag enzymatic sequence. In some embodiments, peptides comprise an avidin or streptavidin.

[0391] For mammalian expression, a construct encoding the CMV peptide was designed with a C-terminal Flag-tag with and without a C-terminal His-tag in a mammalian expression vector. Peptides were expressed by transient transfection in Expi293F or ExpiCHO-S cells (Life Technologies) according to the manufacturer's recommendations.

[0392] Peptides were purified from cell culture supernatants with anti-Flag affinity chromatography (Genscript) or by Ni-affinity chromatography. Size exclusion chromatography (SEC) can be performed on a hydrophilic resin (GE Life Sciences) pre-equilibrated in 20 mM HEPES, 150 mM NaCl, pH 7.2.

[0393] Alternatively, peptides are purified by Ni-affinity chromatography without SEC purification, using a column buffer of 23 mM sodium phosphate, 500 mM sodium chloride, 500 mM imidazole, pH 7.4.

[0394] Peptides produced in mammalian cells can be quantitated by UV at 280 nm, whereas CFPS-produced peptides were quantitated by a sandwich ELISA relative to a standard protein.

### Peptide Exchange

[0395] p*MHC multimers are used to generate a library of or microarray of pMHC multimers loaded with a diversity of unique peptide epitopes by in situ or in vitro peptide exchange reactions as described herein. In some embodiments, the peptide exchange reactions are performed in multiwell formats and under native conditions. Binding is determined by a number of techniques, such as ELISA, which monitors the stability of the MHC structure, or by biophysical techniques that monitor peptide binding, such as fluorescence polarization. Non-limiting exemplifications of peptide exchange via dipeptide exchange or UV-mediated exchange are described in detail in Example 4.

[0396] In some embodiments, to measure the dissociation efficiency of placeholder peptides or peptide fragments a fluorescently labeled placeholder peptide is used in exchange reactions in the presence of unlabeled exchange peptides. Aliquots of fluorescently labeled p*MHC multimers are either left untreated or exposed to peptide exchange conditions (e.g., UV exposure) for different time periods. The amount of remaining p*MHC-containing the placeholder peptide is monitored by fluorescence analysis to monitor the reduction in p*MHC complexes.

[0397] In some embodiments, the placeholder peptide has a lower affinity for the MHC peptide binding groove than the exchanged peptide epitope, and wherein step (d) comprises contacting the p*MHC monomer with an excess of peptide epitope in a competition assay. In some embodiments, the placeholder peptide has a KD that is about 10-fold lower than the exchanged peptide epitope.

[0398] Peptides that bind to the peptide binding groove of the MHC molecule can be a naturally occurring peptide but can also be synthetically created using the knowledge of the binding specificity of the B and F pocket of the particular MHC molecule or the supertype family it belongs to. Suitable ligands can be generated using the available 3D structures of MHC complexes and the knowledge on the binding pocket specificity of the respective MHC molecules.

[0399] Peptide binding specificity of MHC I polypeptides is primarily governed by the physiochemical properties of the B and F binding pockets in a coupled fashion. The B and F binding pockets typically bind to “anchor residues” in the peptide that define the binding of the peptide in the peptide binding groove of the MHC. The observed diversity in the amino acid residues of the peptide binding groove of the MHC molecules defines the peptide-binding and the presentation repertoire of the individual MHC molecule (Chang et al. (2011) Frontiers in Bioscience, Landmark Edition, Vol. 16:3014-3035). The specificity of the pockets for anchor residues has been elucidated for a large number MHC molecules, for example, as described in Sidney et al. (2008) BMC Immunology Vol. 9:1).

[0400] The disclosure further provides a method of producing a p*MHC multimer comprising: producing an p*MHC multimer in which the peptide in the binding groove is a placeholder peptide; contacting the p*MHC multimer with a reducing agent to remove the placeholder peptide; and contacting the p*MHC multimer with an MHC peptide epitope under conditions sufficient for binding of the peptide epitope in the MHC peptide binding groove.

[0401] The two contacting steps are preferably performed by providing a sample comprising the MHC molecule with the MHC peptide epitope and the reducing agent. Preferably the MHC peptide epitope is present when the reducing agent is added. In some embodiments, one MHC peptide epitope is added per reaction. In some embodiments, two or more peptide epitopes are added to the reaction.

[0402] In some embodiments, peptide exchange is induced by elevating the temperature of the mixture to between about 30°−37° C. In some embodiments, the mixture is elevated to 31°, 32°, 33°, 34°, 35°, 36° or 37°.

[0403] In some embodiments, peptide exchange is induced by reducing the pH of the mixture to between about pH 2.5-5.5. In some embodiments, peptide exchange is induced by increasing the pH of the mixture to about pH 9-11.

[0404] In some embodiments, the placeholder peptide comprises a photocleavable moiety to form pMHC complexes as described (e.g., Toebes et al. (2006) Nat. Med. 12:246-251;

[0405] Bakker et al. (2008) PNAS 105:3825-383; Frosig et al. (2015) Cytometry Part A, 87A:967-975; Chang et al. (2013) Eur. J. Immunol. 43:1109-1120). In some embodiments, the placeholder peptide comprises a non-natural amino acid that contains a (2-nitro)phenyl side chain. In some embodiments, the amino acid is the UV-sensitive β-amino acid comprising 3-amino-3-(2-nitro)phenyl-propionic acid. In some embodiments, the UV-sensitive amino acid is (2-nitro)phenylglycine.

[0406] In some embodiments, the placeholder peptide is an HLA-A2 peptide. In some embodiments, the HLA-A2 placeholder peptide is p*A2, KILGCVFJV (SEQ ID NO:15) or GILGFVFJL (SEQ ID NO: 7), wherein J is 3-amino-3-(2-nitro)phenyl-propionic acid.

[0407] In some embodiments, the placeholder peptide is an HLA-A1, -A3, A11 or -B7 peptide containing a photocleavable moiety. In some embodiments, the placeholder peptide is selected from the group consisting of p*A1:01, STAPGJLEY (SEQ ID NO: 16); p*A3:01, RIYRJGATR (SEQ ID NO:17); p*A11:01, RVFAJSFIK (SEQ ID NO: 18); p*A24:02, VYGJVRACL (SEQ ID NO: 11); p*B7:02, AARGJTLAM (SEQ ID NO: 14); p*B35:01, KPIVVLJGY (SEQ ID NO: 19); p*C3:04, FVYGJSKTSL (SEQ ID NO: 20), p*B8:01, FLRGRAJGL (SEQ ID NO: 21); p*C7:02, VRIJHLYIL (SEQ ID NO: 22); p*C4:01, QYDJAVYKL (SEQ ID NO: 23); p*B15:01, ILGPJGSVY (SEQ ID NO: 24); p*B40:01, TEADVQJWL (SEQ ID NO: 25); p*B58:01, ISARGQJLF (SEQ ID NO: 26); AND p*C8:01, KAAJDLSHFL (SEQ ID NO: 27), wherein J is 3-amino-3-(2-nitro)phenyl-propionic acid.

[0408] In some embodiments, the placeholder peptide further comprises a fluorescent label. In so embodiments, the fluorescent label is attached to a cysteine residue in the placeholder peptide.

[0409] Upon irradiation with long-wavelength UV, the peptide is cleaved and dissociates from the MHC complex in the presence of one or more peptides to facilitate the formation of stable pMHC monomers or multimers. Typically, MHC peptide exchange is performed in multiwell format for high-throughput screening of peptide ligands as described herein. Only peptide candidates that can effectively bind and stabilize the peptide-receptive MHC molecules prevent dissociation of the MHC complexes. Peptide exchange can be monitored by a number of techniques such as ELISA or fluorescence polarization, for example, as generally described in Rodenko et al. ((2006) Nat. Protocol. 1:1120-1132).

[0410] The resulting pMHC multimers are subsequently analyzed by gel-filtration HPLC and MHC ELISA to determine three parameters: the efficiency of MHC refolding, the stability of the pMHC complex in the absence of UV exposure, and the UV-sensitivity of the complex.

[0411] Certain di-peptides can assist folding and peptide exchange of MHC class I molecules. Di-peptides bind specifically to the F pocket of MHC class I molecules to facilitate peptide exchange and have so far been described and validated for peptide exchange in HLA-A*02:01, HLA-B*27:05, and H-2Kb molecules (Saini et al. (2013) Proc Natl Acad Sci USA. 110(38):15383-8).

[0412] Accordingly, in some embodiments, peptide exchange of the placeholder peptide with a peptide or peptides of interest are catalyzed by a dipeptides which catalyze rapid peptide exchange on MHC class I molecules (see, e.g., Saini et al. (2015) Proc Natl Acad Sci USA. 112(1):202). Suitable dipeptides are those with a hydrophobic second residue. In some embodiments, the dipeptide is glycyl-leucine (GL), glycyl-valine (GV), glycyl-methione (GM), glycyl-cyclohexylalanine (GCha), glycyl-homoleucine (GHle) or glycyl-phenylalanine (GF).

Production of pMHC Libraries

[0413] In one aspect, provided herein are methods of producing a library of pMHC multimers comprising a diversity of loaded peptide epitopes. Various steps in the preparation of peptide-exchanged, barcoded pMHC libraries are illustrated schematically in FIG. 18. These steps use standard methods known in the art for preparing barcoded libraries, including use of single-cell sequencing, use of porous hydrogels, use of single template PCR to generate peptide-encoding amplicons (barcodes) and use of in-drop in vitro transcription/translation (IVTT).

[0414] A non-limiting exemplification of single-cell sequencing with pooled, barcoded, UV-peptide exchanged MHC tetramers is described in Example 9. A non-limiting exemplification of production of porous hydrogels for high throughput production of barcoded, UV-peptide exchanged MHC tetramer pools is described in detail in Example 10. A non-limiting exemplification of use of single template PCR to generate peptide-encoding amplicons is described in detail in Example 11. A non-limiting exemplification of loading of barcodable, exchange-ready MHC tetramers onto hydrogel is described in Example 12. A non-limiting exemplification of in-drop in vitro transcription/translation (IVTT) of peptide and UV exchange into loaded MHC tetramers is described in detail in Example 13. A non-limiting exemplification of release of UV-peptide exchanged, barcoded pMHC tetramers from hydrogels is described in detail in Example 14.

[0415] In some embodiments, the method comprises (a) providing a plurality of placeholder peptide loaded MHCI (p*MHCI) monomers each comprising (i) an MHCI heavy chain polypeptide, or a functional fragment thereof, (ii) a β2-microglobulin polypeptide or functional fragment thereof, (iii) a conjugation moiety, and (iv) a placeholder peptide bound in the peptide binding groove of each MHCI monomer; (b) providing a plurality of multimerization domains, wherein each subunit of the multimerization domain comprises a conjugation moiety; (c) combining the p*MHCI monomers and the multimerization domains under conditions sufficient for covalent conjugation between the two or more p*MHCI monomers and a multimerization domain to produce p*MHCI multimers; and (d) replacing the placeholder-peptide in the plurality of p*MHCI multimers with a peptide library comprising plurality of unique MHCI peptide epitopes to produce a plurality of peptide loaded MHCI (pMHCI) multimers.

[0416] In some embodiments, the method comprises (a) providing a plurality of placeholder peptide loaded MHCI (p*MHCI) monomers each comprising (i) an MHCI heavy chain polypeptide, or a functional fragment thereof, (ii) a β2-microglobulin polypeptide or functional fragment thereof, (iii) a conjugation moiety, and (iv) a placeholder peptide bound in the peptide binding groove of each MHCI monomer; (b) providing a plurality of multimerization domains, wherein each subunit of the multimerization domains comprises a conjugation moiety and the multimerization domain comprises at least one non-covalent binding site; (c) combining the plurality of p*MHCI monomers and the plurality of multimerization domain under conditions sufficient for covalent conjugation between the two or more p*MHCI monomers and a multimerization domain to produce a plurality of p*MHCI multimers; (d) replacing the placeholder peptide bound in the peptide binding groove of the p*MHCI multimers with a plurality of unique rescue peptide epitopes to produce a plurality of pMHCI multimers; and (e) binding an oligonucleotide barcode to the non-covalent binding site on the multimerization domain.

[0417] In some embodiments, the method comprises (a) providing a plurality of placeholder peptide loaded MHCI (p*MHCI) monomers each comprising (i) an MHCI heavy chain polypeptide, or a functional fragment thereof, (ii) a β2-microglobulin polypeptide or functional fragment thereof, (iii) a peptide linker comprising a conjugation moiety at the C-terminus of (i) or (ii); and (iv) a placeholder peptide bound in the peptide binding groove of each MHCI monomer; (b) providing a plurality of multimerization domains comprising a peptide linker comprising a conjugation moiety at the N-terminus of each subunit of the multimerization domain; (c) combining the plurality of p*MHCI monomers and the plurality of multimerization domains under conditions sufficient for covalent conjugation between two or more p*MHCI monomers to a multimerization domain to produce a plurality of p*MHCI multimers; and (d) replacing the placeholder peptide bound in the peptide binding groove of the p*MHCI multimers with a plurality of unique rescue peptide epitopes to produce a plurality of pMHCI multimers.

### Labeling

[0418] pMHC multimers can be conjugated with a fluorescent label, allowing for identification of T cells that bind the peptide-MHC multimer, for example, via flow cytometry or microscopy. T cells can also be selected based on a fluorescence label through, e.g., fluorescence activated cell sorting.

[0419] In some embodiments, one or more detectable labels are conjugated to a linker. According to this invention, a “detectable label” is any molecule or functional group that allows for the detection of a biological or chemical characteristic or change in a system, such as the presence of a target substance in the sample.

[0420] Examples of detectable labels which may be used include fluorophores, chromophores, electro chemiluminescent labels, bioluminescent labels, polymers, polymer particles, bead or other solid surfaces, gold or other metal particles or heavy atoms, spin labels, radioisotopes, enzyme substrates, haptens, antigens, Quantum Dots, aminohexyl, pyrene, nucleic acids or nucleic acid analogs, or proteins, such as receptors, peptide ligands or substrates, enzymes, and antibodies (including antibody fragments).

[0421] Examples of polymer particles labels which may be used include micro particles, beads, or latex particles of polystyrene, PMMA or silica, which can be embedded with fluorescent dyes, or polymer micelles or capsules which contain dyes, enzymes or substrates. Examples of metal particles which may be used include gold particles and coated gold particles, which can be converted by silver stains. Examples of haptens that may be conjugated in some embodiments are fluorophores, myc, nitrotyrosine, biotin, avidin, streptavidin, 2,4-dinitrophenyl, digoxigenin, bromodeoxy uridine, sulfonate, ace tylaminoflurene, mercury trintrophonol, and estradiol.

[0422] Examples of enzymes which may be used comprise horseradish peroxidase (HRP), alkaline phosphatase (AP), beta-galactosidase β3-GAL), glucose-6-phosphate dehydrogenase, beta-N-acetylglucosaminidase, βglucuronidase, invertase, Xanthine Oxidase, firefly luciferase and glucose oxidase (GO). Examples of commonly used substrates for HRP include 3,3′-diaminobenzidine (DAB), diaminobenzidine with nickel enhancement, 3-amino-9-ethylcarbazole (AEC), Benzidine dihydrochloride (BDHC), Hanker-Yates reagent (HYR), Indophane blue (IB), tetramethylbenzidine (TMB), 4-chloro-1-naphtol (CN), alpha-naphtol pyronin (α-NP), o-dianisidine (OD), 5-bromo-4-chloro-3-indolylphosphate (BCIP), Nitroblue tetrazolium (NBT), 2-(p-iodophenyl)-3-p-nitrophenyl-5-phenyltetrazolium chloride (INT), tetranitro blue tetrazolium (TNBT), and Δ-bromo-chloro-S-indoxyl-beta-D-galactoside/ferro-ferricyanide (BCIG/FF). Examples of commonly used substrates for AP include Naphthol-AS-B 1-phosphate/fast red TR (NABP/FR), Naphthol-AS-MX-phosphate/fast red TR (NAMP/FR), Naphthol-AS-B1-phosphate/fast red TR (NABP/FR), Naphthol-AS-MX-phosphate/fast red TR (NAMP/FR), Naphthol-AS-B1-phosphate/new fuschin (NABP/NF), bromochloroindolylphosphate/nitroblue tetrazolium (BCIP/NBT), b-Bromo-chloro-S-indolyl-beta-delta-galactopyranoside (BCIG).

[0423] Examples of luminescent labels which may be used include luminol, isoluminol, acridinium esters, 1,2-dioxetanes and pyridopyridazines. Examples of electrochemiluminescent labels include ruthenium derivatives. Examples of radioactive labels which may be used include radioactive isotopes of iodide, cobalt, selenium, hydrogen, carbon, sulfur, and phosphorous.

[0424] Some “detectable labels” also include “color labels,” in which the biological change or event in the system may be assayed by the presence of a color, or a change in color. Examples of “color labels” are chromophores, fluorophores, chemiluminescent compounds, electrochemiluminescent labels, bioluminescent labels, and enzymes that catalyze a color change in a substrate.

[0425] “Fluorophores” as described herein are molecules that emit detectable electro-magnetic radiation upon excitation with electro-magnetic radiation at one or more wavelengths. A large variety of fluorophores are known in the art and are developed by chemists for use as detectable molecular labels and can be conjugated to the pMHC multimers provided herein. Examples include FLUORESCEIN™ or its derivatives, such as FLUORESCEIN®-5-isothiocyanate (FITC), 5-(and 6)-carboxyFLUORESCEIN®, 5- or 6-carboxyFLUORESCEIN®, 6-(FLUORESCEINO)-5-(and 6)-carboxamido hexanoic acid, FLUORESCEIN® isothiocyanate, rhodamine or its derivatives such as tetramethyl rhodamine and tetramethylrhodamine-5-(and -6) isothiocyanate (TRITC). Other fluorophores include: coumarin dyes such as (diethyl-amino)coumarin or7-amino-4-methylcoumarin-3-acetic acid, succinimidyl ester (AMCA); sulforhodamine 101 sulfonyl chloride (TexasRed® or TexasRed® sulfonyl chloride; 5-(and -6)-carboxyrhodamine 101, succinimidyl ester, also known as 5-(and -6)-carboxy-X-rhodamine, succinimidyl ester (CXR); lissamine or lissamine derivatives such as lissamine rhodamine B sulfonyl Chloride (LisR); 5-(and -6)-carboxyFLUORESCEIN®, succinimidyl ester (CFI); FLUORESCEIN®5-isothiocyanate (FITC); 7-diethylaminocoumarin-3-carboxylic acid, succinimidyl ester (DECCA); 5-(and -6)-carboxytetramethyl-rhodamine, succinimidyl ester (CTMR); 7-hydroxycoumarin-3-carboxylic acid, succinimidyl ester (HCCA); 6->FLUORESCEIN®-5-(and -6)-carboxamidolhexanoic acid (FCHA); N-(4,4-difluoro-5,7-dimethyl-4-bora-3a,4a-diaza-3-indacenepropionic acid, succinimidyl ester; also known as 5,7-dimethylBODIPY® propionic acid, succinimidyl ester (DMBP); “activated FLUORESCEIN® derivative” (FAP), available from Probes, Inc.; eosin-5-isothiocyanate (EITC); erythrosin-5-isothiocyanate (Er1TC); and Cascade® Blue acetylazide (CBAA) (the O-acetylazide derivative of 1-hydroxy-3,6,8-pyrene-trisulfonic acid). Yet other potential fluorophores useful in the invention include fluorescent proteins such as green fluorescent protein and its analogs or derivatives, fluorescent amino acids such as tyrosine and tryptophan and their analogs, fluorescent nucleosides, and other fluorescent molecules such as Cy2, Cy3, Cy3.5, CY5™, CY5.5™, Cy7, IR dyes, Dyomics dyes, phycoerythrine, Oregon green 488, pacific blue, rhodamine green, and Alexa dyes. Yet other examples of fluorescent labels include conjugates of R-phycoerythrin orallophycoerythrin, inorganic fluorescent labels such as particles based on semiconductor material like coated CdSe nanocrystallites.

[0426] A number of the fluorophores above, as well as others, are available commercially, from companies such as Probes, Inc. (Eugene, Oreg.), Pierce Chemical Co. (Rockford, Ill.), or Sigma-Aldrich Co. (St. Louis, Mo.).

[0427] The detectable label can be detected by numerous methods, including, for example, reflectance, transmittance, light scatter, optical rotation, and fluorescence or combinations hereof in the case of optical labels or by film, scintillation counting, or phosphorimaging in the case of radioactive labels. See, e.g., Larsson, 1988, Immunocytochemistry: Theory and Practice, (CRC Press, Boca Raton, Fla.); Methods in Molecular Biology, vol. 80 1998, John D. Pound (ed.) (Humana Press, Totowa, N.J.). In some embodiments, more than one detectable labels employed.

### Identifiers and Barcoding

[0428] In certain embodiments, a Conjugated Multimer of the disclosure comprises an identifier tag or label, such as an oligonucleotide barcode, that facilitates identification of the Conjugated Multimer. Typically, the identifier tag, e.g., oligonucleotide barcode, is attached to the multimerization domain of the Conjugated Multimer, such as through a binding moiety on the identifier tag, e.g., oligonucleotide barcode, that binds to a binding site on the multimerization domain. For example, when the multimerization domain is streptavidin or avidin, since the pMHCI monomers are conjugated to the multimerization domain at a site other than the biotin-binding site, the Conjugated Multimer can be labeled with an identifier tag, e.g., oligonucleotide barcode, using a biotinylated form of the identifier tag, e.g., a biotinylated oligonucleotide barcode. Labeling of the Conjugated Multimer is then easily achieved by incubation of the Conjugated Multimer with the biotinylated identifier tag, e.g., biotinylated oligonucleotide barcode. A non-limiting exemplification of barcoding of Conjugated Multimers using biotinylated oligonucleotides is described in detail in Example 8.

[0429] In another embodiment, the Conjugated Multimer is labeled with an identifier tag, e.g., oligonucleotide barcode, in the peptide portion of the multimer. That is, barcode-labeled MHC-binding peptides can be used in an exchange reaction as described herein to the load the Conjugated Multimers with barcode-labeled peptides.

[0430] Typically, an oligonucleotide barcode is a unique oligonucleotide sequence ranging for 10 to more than 50 nucleotides. The barcode has shared amplification sequences in the 3′ and 5′ ends, and a unique sequence in the middle. This sequence can be revealed by sequencing and can serve as a specific barcode for a given molecule.

[0431] In one embodiment, the nucleic acid component of the barcode (typically DNA) has a special structure. Thus, in one embodiment, the at least one nucleic acid molecule is composed of at least a 5′ first primer region, a central region (barcode region), and a 3′ second primer region. In this way the central region (the barcode region) can be amplified by a primer set. The length of the nucleic acid molecule may also vary. Thus, in other embodiments, the at least one nucleic acid molecule has a length in the range 20-100 nucleotides, such as 30-100, such as 30-80, such as 30-50 nucleotides. In one embodiment, the nucleic acid identifier is from 40 nucleotides to 120 nucleotides in length. The coupling of the oligonucleotide barcode to the Conjugated Multimer may also vary. Thus, in one embodiment, the at least one oligonucleotide barcode is linked to said Conjugated Multimer via a biotin binding domain interacting with streptavidin or avidin within the Conjugated Multimer. Other coupling moieties may also be used, depending on the availability of an appropriate binding site with the Conjugated Multimer (e.g., within the multimerization domain of the Conjugated Multimer) and an appropriate corresponding binding domain that can be attached to the oligonucleotide barcodes molecules to facilitate attachment.

[0432] In a further embodiment, the at least oligonucleotide barcode molecule comprises or consists of DNA, RNA, and/or artificial nucleotides such as PLA or LNA. Preferably DNA, but other nucleotides may be included to e.g. increase stability.

[0433] The use of barcode technology is well known in the art, see for example Shiroguchi et al. (2012) Proc. Natl. Acad. Sci. USA., 109(4):1347-52; and Smith et al. (2010) Nucleic Acids Research 38(13)11:e142. Further methods and compositions for using barcode technology include those described in U.S. 2016/0060621. Use of barcode technology specifically to label MHC multimers also has been described, see for example Bentzen et al. (2016) Nature Biotech. 34:10: 1037-1045; Bentzen and Hadrup (2017) Cancer Immunol. Immunotherap. 66:657-666. Standard methods for preparing barcode oligonucleotides, including conjugating them with a suitable binding moiety (e.g., biotinylation) that can bind the Conjugated Multimer, are known in the art and can be applied to preparing barcode oligonucleotides for labeling the Conjugated Multimers.

[0434] Methods for generating customizable DNA barcode libraries are publicly available. Programs include Generator and nxCode, consisting of 96-587 barcodes, respectively, as well as The DNA Barcodes Package and TagD software (reporting generating libraries consisting of 100,000 barcodes).

[0435] Preparation of a variety of large-scale barcode libraries have been described in the art, which approaches can be used to obtain barcode libraries for labeling pMHC Conjugated Multimer libraries. For example, Xu et al. describe a set of 240,000 unique 25-mer oligonucleotides with sequences that have similar amplifications properties while maintaining maximum diversity of their identification motifs (Xu et al. (2008) PNAS 106:2289-2294). Wang et al. describe construction of barcode sets using particle swarm optimization (Wang et al. (2008) IEEE/ACM Trans. Comput. Biol. Bioinform. 15:999-1002). Lyons describes generation of large-scale libraries of DNA barcodes of up to one million members (Lyons (2017) Sci. Reports 7:13899).

[0436] In some cases, the unique molecular identifier barcode is encoded by a contiguous sequence of nucleotides tagged to one end of a target nucleic acid. In other cases, the unique molecular identifier (UMI) barcode is encoded by a non-contiguous sequence. Non-contiguous UMIs can have a portion of the barcode at a first end of the target nucleic acid and a portion of the barcode at a second end of the target nucleic acid. In some cases, the UMI is a non-contiguous barcode containing a variable length barcode sequence at a first end and a second identifier sequence at a second end of the target nucleic acid. In some cases, the UMI is a non-contiguous barcode having a variable length barcode sequence at a first end and a second identifier sequence at a second end of the target nucleic acid, wherein the second identifier sequence is determined by a position of a transposase fragmentation event, e.g., a transposase fragmentation site and transposon end insertion event.

[0437] In some cases, the barcode is a “variable length barcode.” As used herein, a variable length barcode is an oligonucleotide that differs from other variable length barcode oligonucleotides in a population, by length, which can be identified by the number of contiguous nucleotides in the barcode. In some cases, additional barcode complexity for the variable length barcode can be provided by the use of variable nucleotide sequence, as described in the paragraphs above, in addition to the variable length.

[0438] In an exemplary embodiment, a variable length barcode can have a length of from 0 to no more than 5 nucleotides. Such a variable length barcode can be denoted by the term “[0-5].” In such an embodiment, it is understood that a population of target nucleic acids that are attached to such a variable length barcode is expected to include at least one target nucleic acid attached to a variable length barcode that has at least 1 nucleotide (e.g., attached to a variable length barcode having only 1, only 2, only 3, only 4, or only 5 nucleotides). In such an embodiment, it is further understood that a population of target nucleic acids that are attached to such a variable length barcode can include at least one target nucleic acid that contains no variable length barcode (i.e., a variable length barcode having a length of 0), and/or at least one target nucleic acid that contains a variable length barcode having only 1 nucleotide, and/or at least one target nucleic acid that contains a variable length barcode having only 2 nucleotides, and/or at least one target nucleic acid that contains a variable length barcode having only 3 nucleotides, and/or at least one target nucleic acid that contains a variable length barcode having only 4 nucleotides, and/or and at least one target nucleic acid that contains a variable length barcode having only 5 nucleotides. In such an embodiment, the [0-5] variable length barcode can uniquely identify (differentiate), by itself, 5 different target nucleic acid molecules of the same sequence. Further, in such an embodiment, the [0-5] variable length barcode can uniquely identify (differentiate) 5 different target nucleic molecules of a first sequence, 5 different target nucleic acid molecules of a second sequence, etc. for each different target nucleic acid sequence. Furthermore, barcode labelled MHC-multimers can be used in combination with single-cell sorting and TCR sequencing, where the specificity of the TCR can be determined by the co-attached barcode. This will enable us to identify TCR specificity for potentially 1000+different antigen responsive T cells in parallel from the same sample, and match the TCR sequence to the antigen specificity. The future potential of this technology relates to the ability to predict antigen responsiveness based on the TCR sequence.

[0439] The complexity of the barcode labeled MHC multimer libraries will allow for personalized selection of relevant TCRs in a given individual.

[0440] The barcode is co-attached to the multimer and serves as a specific label for a particular peptide-MHC complex. In this way at least 1000 to 10,000 or more different peptide-MHC multimers can be mixed, allow specific interaction with T cells from blood or other biological specimens, wash-out unbound MHC-multimers and determine the sequence of the DNA-barcodes. When selecting a cell population of interest, the sequence of barcodes present above background level, will provide a fingerprint for identification of the antigen responsive cells present in the given cell-population. The number of sequence-reads for each specific barcode will correlate with the frequency of specific T cells, and the frequency can be estimated by comparing the frequency of reads to the input-frequency of T cells.

[0441] The DNA-barcode serves as a specific labels for the antigen specific T cells and can be used to determine the specificity of a T cell after e.g. single-cell sorting, functional analyses or phenotypical assessments. In this way antigen specificity can be linked to both the T cell receptor sequence (that can be revealed by single-cell sequencing methods) and functional and phenotypical characteristics of the antigen specific cells.

[0442] Barcode labeled MHC multimer libraries can be used for the quantitative assessment of MHC multimer binding to a given T cell clone or TCR transduced/transfected cells. Since sequencing of the barcode label allow several different labels to be determined simultaneously on the same cell population, this strategy can be used to determine the avidity of a given TCR relative to a library of related peptide-MHC multimers. The relative contribution of the different DNA-barcode sequences in the final readout is determined based on the quantitative contribution of the TCR binding for each of the different peptide-MHC multimers in the library. Using titration based analyses it is possible to determine the quantitative binding properties of a TCR in relation to a large library of peptide-MHC multimers, all merged into a single sample. For this particular purpose the MHC multimer library may specifically hold related peptide sequences or alanine-substitution peptide libraries.

[0443] In some embodiments, unique identifiers can be used for each sample of a plurality of samples. In some embodiments, identifiers can be shared between two or more samples. In some embodiments, identifiers can comprise some sequences that are shared between all samples, and other sequences that are unique to one sample. In some embodiments, an identifier can comprise a sequence shared between all samples, and a sequence unique to one sample. In some embodiments, a sequence shared between samples can be used for identifier amplification (e.g., PCR amplification with suitable primers). In some embodiments, a sequence unique to one sample or shared between a subset of samples can be used for detection or quantification via qPCR (e.g., sequences for hydrolysis probes, such as TaqMan probes). In some embodiments, a sequence unique to one sample or shared between a subset of samples can be used for detection or quantification via sequencing.

[0444] In some embodiments, an identifier can comprise a unique, in sitico-generated sequence; each identifier sequence can be assigned to a sample of a plurality of samples and the identifier-sample assignment can be stored in a database. In some embodiments, an identifier can comprise a nucleotide sequence that codes for all or part of a peptide or protein.

[0445] In some embodiments, an identifier can comprise a nucleotide sequence that codes for an open reading frame. In some embodiments, an identifier can comprise a nucleotide sequence that includes a promoter sequence. In some embodiments, an identifier can comprise a nucleotide sequence that includes a binding site for a DNA-binding protein, e.g. a transcription factor or polymerase enzyme. In some embodiments, an identifier can comprise one or more sequences targeted by a nuclease, e.g. a restriction enzyme. In some embodiments, an identifier can comprise all sequence elements necessary for in vitro transcription and translation of a sequence. In some embodiments, an identifier does not comprise all sequence elements necessary for in vitro transcription and translation of a sequence.

[0446] In some embodiments, an identifier can comprise a biotinylated nucleotide sequence. In some embodiments, an identifier can be biotinylated by PCR amplification with a biotinylated primer(s). In some embodiments, an identifier can be biotinylated by enzymatic incorporation of a biotinylated label, e.g. a biotin dUTP label, by use of Klenow DNA polymerase enzyme, nick translation or mixed primer labeling RNA polymerases, including T7, T3, and SP6 RNA polymerases. In some embodiments, an identifier can be biotinylated by photobiotinylation, e.g. photoactivatable biotin can be added to the sample, and the sample irradiated with UV light.

[0447] In some embodiments, an identifier can be generated from a template polynucleotide, e.g. via PCR amplification of a template DNA. In some embodiments, a template polynucleotide can comprise a nucleotide sequence that codes for an open reading frame. In some embodiments, a template polynucleotide can comprise a nucleotide sequence that includes a promoter sequence. In some embodiments, a template polynucleotide can comprise a nucleotide sequence that includes a binding site for a DNA-binding protein, e.g. a transcription factor or polymerase enzyme. In some embodiments, a template polynucleotide can comprise one or more sequences targeted by a nuclease, e.g. a restriction enzyme. In some embodiments, a template polynucleotide can comprise all sequence elements necessary for in vitro transcription and translation of a sequence. In some embodiments, a template polynucleotide does not comprise all sequence elements necessary for in vitro transcription and translation of a sequence.

[0448] pMHC multimers with attached identifiers (e.g., oligonucleotide barcodes) can be incubated with a plurality of T cells, followed by sorting of T cells into single-cell compartments. T cells are lysed, and nucleic acids from lysed T cells comprising identifiers are produced. Nucleic acids are pooled and sequenced. Identifiers allow matching of peptide identifiers to T cell sequences from the same compartment. TCR-antigen specificity profiles are determined by identifying a TCR sequence (e.g., variable region, hypervariable region, or CDR) from a compartment, and quantifying peptide identifier reads from the same compartment.

[0449] Multiple TCRs can be identified that exhibit binding affinity for peptides of the peptide library, and multiple peptides can be identified that exhibit binding affinity for specific TCRs.

[0450] Epitope mutations in an antigen of an identified TCR-antigen pair can be identified that result in increased or TCR binding affinity.

[0451] Peptides and TCR sequences can be identified that are associated with control of disease associated protein, and can be used to design vaccines and cell therapies.

[0452] For assessing response to therapy, for each peptide identifier sequenced, corresponding TCR sequences are identified. Multiple TCRs are identified that exhibit binding affinity for some peptides of the peptide library, and multiple peptides are identified that exhibit binding affinity for some TCRs. Subjects are followed longitudinally and results of assays are compared to identify peptides and TCR sequences that are associated with successful response to immunotherapy.

### V. Peptide Synthesis

[0453] Peptides can be are generated according to methods known in the art, or synthetically produced by a commercial vendor or using a peptide synthesizer according to manufacturer's instructions. It is understood that the T cell epitopes described herein can be produced by a variety of approaches using synthetic chemistries and recombinant methodologies. Methods for making recombinant proteins, using recombinant technologies, e.g., recombinant DNA technologies, cloning vectors, expression vectors, transfection methodologies, host cells, and culture conditions are known in the art. See, e.g., US 2020/0207849, US 2021/0101955, US 2021/0101975 and US 2021/013043.

[0454] It is contemplated that a T cell epitope can be expressed using recombinant DNA technology, for example, introducing an expression construct into bacterial cells, insect cells, or mammalian cells, and purifying the recombinant protein from cell extracts.

[0455] General techniques for nucleic acid manipulation are described in, for example, Sambrook et al., Molecular Cloning. A Laboratory Manual, 2nd Edition, Vols. 1-3, Cold Spring Harbor Laboratory Press (1989), or Ausubel, F. et al., Current Protocols in Molecular Biology, Green Publishing and Wiley-Interscience, New York (1987) and periodic updates, herein incorporated by reference. Generally, the DNA encoding the polypeptide is operably linked to suitable transcriptional or translational regulatory elements derived from mammalian, viral, or insect genes. Such regulatory elements include a transcriptional promoter, an optional operator sequence to control transcription, a sequence encoding suitable mRNA ribosomal binding site, and sequences that control the termination of transcription and translation. The ability to replicate in a host, usually conferred by an origin of replication, and a selection gene to facilitate recognition of transformants is additionally incorporated.

[0456] Both expression and cloning vectors contain a nucleic acid sequence that enables the vector to replicate in one or more selected host cells. Generally, in cloning vectors this sequence is one that enables the vector to replicate independently of the host chromosomal DNA, and includes origins of replication or autonomously replicating sequences. Such sequences are well known for a variety of bacteria, yeast, and viruses. The origin of replication from the plasmid pBR322 is suitable for most Gram-negative bacteria, the 2 micron plasmid origin is suitable for yeast, and various viral origins (SV40, polyoma, adenovirus, VSV or BPV) are useful for cloning vectors in mammalian cells. Generally, the origin of replication component is not needed for mammalian expression vectors (the SV40 origin may typically be used only because it contains the early promoter).

[0457] Expression and cloning vectors may contain a selection gene, also termed a selectable marker. Typical selection genes encode proteins that (a) confer resistance to antibiotics or other toxins, e.g., ampicillin, neomycin, methotrexate, or tracycline, (b) complement auxotrophic deficiencies, or (c) supply critical nutrients not available from complex media, e.g., the gene encoding D-alanine racemase for Bacilli.

[0458] Expression and cloning vectors usually contain a promoter that is recognized by the host organism and is operably linked to the nucleic acid encoding the protein described herein, e.g., a fibronectin-based scaffold protein. Promoters suitable for use with prokaryotic hosts include the phoA promoter, beta-lactamase and lactose promoter systems, alkaline phosphatase, a tryptophan (trp) promoter system, and hybrid promoters such as the tan promoter. However, other known bacterial promoters are suitable. Promoters for use in bacterial systems also will contain a Shine-Dalgarno (S.D.) sequence operably linked to the DNA encoding the protein described herein. Promoter sequences are known for eukaryotes. Virtually all eukaryotic genes have an AT-rich region located approximately 25 to 30 bases upstream from the site where transcription is initiated. Another sequence found 70 to 80 bases upstream from the start of transcription of many genes is a CNCAAT region where N may be any nucleotide. At the 3′ end of most eukaryotic genes is an AATAAA sequence that may be the signal for addition of the poly A tail to the 3′ end of the coding sequence. All of these sequences are suitably inserted into eukaryotic expression vectors.

[0459] Transcription from vectors in mammalian host cells can be controlled, for example, by promoters obtained from the genomes of viruses such as polyoma virus, fowlpox virus, adenovirus (such as Adenovirus 2), bovine papilloma virus, avian sarcoma virus, cytomegalovirus, a retrovirus, hepatitis-B virus and most preferably Simian Virus 40 (SV40), from heterologous mammalian promoters, e.g., the actin promoter or an immunoglobulin promoter, from heat-shock promoters, provided such promoters are compatible with the host cell systems.

[0460] Transcription of a DNA encoding protein described herein by higher eukaryotes is often increased by inserting an enhancer sequence into the vector. Many enhancer sequences are now known from mammalian genes (globin, elastase, albumin, α-fetoprotein, and insulin). Typically, however, one will use an enhancer from a eukaryotic cell virus. Examples include the SV40 enhancer on the late side of the replication origin (bp 100-270), the cytomegalovirus early promoter enhancer, the polyoma enhancer on the late side of the replication origin, and adenovirus enhancers. See also Yaniv (1982) Nature, 297:17-18 on enhancing elements for activation of eukaryotic promoters. The enhancer may be spliced into the vector at a position 5′ or 3′ to the peptide-encoding sequence, but is preferably located at a site 5′ from the promoter.

[0461] Expression vectors used in eukaryotic hos T cells (e.g., yeast, fungi, insect, plant, animal, human, or nucleated cells from other multicellular organisms) will also contain sequences necessary for the termination of transcription and for stabilizing the mRNA. Such sequences are commonly available from the 5′ and, occasionally 3′, untranslated regions of eukaryotic or viral DNAs or cDNAs. These regions contain nucleotide segments transcribed as polyadenylated fragments in the untranslated portion of mRNA encoding the protein described herein. One useful transcription termination component is the bovine growth hormone polyadenylation region. See WO 94/11026 and the expression vector disclosed therein.

[0462] The expression construct is introduced into the host cell using a method appropriate to the host cell, as will be apparent to one of skill in the art. A variety of methods for introducing nucleic acids into host cells are known in the art, including, but not limited to, electroporation; transfection employing calcium chloride, rubidium chloride, calcium phosphate, DEAE-dextran, or other substances; microprojectile bombardment; lipofection; and infection (where the vector is an infectious agent).

[0463] Suitable host cells include prokaryotes, yeast, mammalian cells, or bacterial cells. Suitable bacteria include gram negative or gram positive organisms, for example, E. coli or Bacillus spp. Yeast, preferably from the Saccharomyces species, such as S. cerevisiae, may also be used for production of polypeptides. Various mammalian or insect cell culture systems can also be employed to express recombinant proteins. Baculovirus systems for production of heterologous proteins in insect cells are reviewed by Luckow et al. (1988) Bio/Technology, 6:47. Examples of suitable mammalian host cell lines include endothelial cells, COS-7 monkey kidney cells, CV-1, L cells, C127, 3T3, Chinese hamster ovary (CHO), human embryonic kidney cells, HeLa, 293, 293T, and BHK cell lines. Purified polypeptides are prepared by culturing suitable host/vector systems to express the recombinant proteins. For many applications, the small size of many of the polypeptides described herein would make expression in E. coli as the preferred method for expression. The protein is then purified from culture media or cell extracts.

[0464] Alternatively, a given peptide can be synthesized by in vitro transcription and translation, where synthesis utilizes the biological principles of transcription and translation in a cell-free context, for example, by providing a nucleic acid template, relevant building blocks (e.g., RNAs, amino acids), enzymes (e.g., RNA polymerase, ribosomes), and conditions.

[0465] Alternatively, a given peptide can be produced using synthetic chemistries. Methods of chemical synthesis of peptides, such as Fmoc-polyamide mode of solid-phase peptide synthesis, are well known in the art and are described in, for example, Lukas et al., (1981) Proc. Natl. Acad. Sci. US.A 78:2791-95. In certain embodiments, the peptide is present in the form of a salt, for example, a pharmaceutically acceptable salt. The peptides can then be purified by one or a combination of techniques such as re-crystallization, size exclusion chromatography, ion-exchange chromatography, hydrophobic interaction chromatography and reverse-phase high performance liquid chromatography using, e.g., acetonitrile/water gradient separation. In certain embodiments, the peptide is formulated as a salt, such as a pharmaceutically acceptable salt. In certain embodiment, the pharmaceutically acceptable salt comprises one or more anions selected from PO₄³⁻, SO₄²⁻, CH₃COO⁻, Cl⁻, Br⁻, NO₃⁻, ClO₄⁻, I⁻, and SCN⁻ and/or one or more cations selected from NH₄⁺, Rb⁺, K⁺, Na⁺, Cs⁺, Li⁺, Zn₂₊, Mg₂⁺, Ca₂+, Mn₂⁺, Cu₂⁺ and Ba₂⁺.

[0466] Peptides and proteins can be purified by isolation/purification methods for peptide and proteins generally known in the field of protein chemistry. Non-limiting examples include extraction, recrystallization, salting out (e.g., with ammonium sulfate or sodium sulfate), centrifugation, dialysis, ultrafiltration, adsorption chromatography, ion exchange chromatography, hydrophobic chromatography, normal phase chromatography, reversed-phase chromatography, get filtration, gel permeation chromatography, affinity chromatography, electrophoresis, countercurrent distribution or any combinations of these. After purification, polypeptides may be exchanged into different buffers and/or concentrated by any of a variety of methods known to the art, including, but not limited to, filtration and dialysis. The resulting peptide is preferably at least 85% pure, or preferably at least 95% pure, and most preferably at least 98% pure. Regardless of the exact numerical value of the purity, the peptide should be sufficiently pure for its intended use.

### VI. Antigen Presenting Cells

[0467] The peptide or composition disclosed herein can be used to load an antigen-presenting cell (APC) in complex with a MHC. MHC class I, composed of an alpha heavy chain and beta-2-microglobulin, is found on most nucleated cells. They present peptides that result from proteolytic cleavage of predominantly endogenous proteins, defective ribosomal products (DRIPs) and larger peptides. However, peptides derived from endosomal compartments or exogenous sources are also frequently found on MHC class I molecules. This non-classical way of class I presentation is referred to as cross-presentation (see Brossart and Bevan (1997) Blood 90:1594-99). MHC Class II molecules, composed of an alpha and a beta chain, is found predominantly on professional APCs such as dendritic cells, macrophages, and B lymphocytes. They primarily present peptides of exogenous or transmembrane proteins that are taken up by APCs during endocytosis and are subsequently processed.

[0468] In certain embodiments, the disclosure provides a composition comprising an isolated APC that presents on an outer cell surface of the APC a peptide comprising a SARS-CoV-2 T cell epitope (e.g., a CD8+ T cell epitope) comprising an amino acid sequence set forth in TABLE 1, wherein the peptide is no more than 100 amino acids in length, and an optional pharmaceutically acceptable carrier. Alternatively, the APC may present an immunodominant T cell epitope, for example, as set forth in TABLE 2. Alternatively or in addition, the T cell epitope is specific for a subject infected with SARS-CoV-2 as noted in TABLE 2. In each case, it the T cell epitope is presented by a MHC class I molecule at the surface of the APC. In certain embodiments, the T cell epitope in the composition comprises at least 8 continuous amino acids of an epitope sequence set forth in TABLE 1 or 2. Furthermore, the composition may comprises a plurality of APCs, each APC presenting a different T cell epitope. For example, the composition can comprise a second, different APC that presents on its outer cell surface of the APC a second, different peptide comprising a SARS-CoV-2 T cell epitope, wherein the second, different epitope optionally comprises an amino acid sequence set forth in any one of TABLES 1-4, and wherein the peptide is no more than 100 amino acids in length.

[0469] In certain embodiment, the disclosure provides a composition comprising an isolated APC that presents on at its outer cell surface (e.g., via MHC class II molecule) a SARS-CoV-2 T cell epitope (a CD4+ epitope) comprising an amino acid sequence set forth in TABLE 3 or 4, wherein the peptide is no more than 100 amino acids in length, and an optional pharmaceutically acceptable carrier. In certain embodiments, the T cell epitope comprises at least 13 continuous amino acids of an epitope sequence set forth in TABLE 3 or 4.

[0470] Furthermore, the composition may comprises a plurality of APCs, each APC presenting a different T cell epitope. For example, the composition can comprise a second, different APC that presents on its outer cell surface of the APC a second, different peptide comprising a SARS-CoV-2 T cell epitope, wherein the second, different epitope optionally comprises an amino acid sequence set forth in any one of TABLES 1-4, and wherein the peptide is no more than 100 amino acids in length.

[0471] In certain embodiments of each of the foregoing aspects, the peptide is no more than 50, 45, 40, 35, 30, 25 or 20 amino acids in length. Alternatively or in addition, the T cell epitope is synthetic. In certain embodiments of each of the foregoing aspects, the APC is a cell of the myeloid lineage, a cell of the lymphoid lineage, or an artificial APC.

[0472] Methods for making APCs are well known in the art and disclosed, for example, in International Application Publication Nos. WO/2020/055931 and WO/2020/198366 and U.S. Patent Application Publication No. 2019/0264176.

[0473] In certain embodiments, the APC is a cell of the myeloid lineage, for example, a dendritic cell (DC), monocyte, macrophage, or Langerhans cell. In certain embodiments, the APC is an immature dendritic cell. In certain embodiments, the APC is a mature DC. In certain embodiments, the APC is a myeloid dendritic cell (mDC), e.g., a CD1c/BDCA-1⁺CD11c^{hi}CD123⁻ or CD141/BDCA-3⁺CD11c^{lo} dendritic cell. In certain embodiments, the APC is a plasmacytoid dendritic cell (pDC), e.g., CD11c⁻CD123⁺BDCA-2/CD303⁺.

[0474] In certain embodiments, the dendritic cell can be prepared in vitro from monocyte-derived DCs (moDCs), which can be generated in vitro from peripheral blood mononuclear cells (PBMCs). In some embodiments, the monocytes can be acquired by elutriating PBMCs into at least a lymphocyte-rich fraction and a monocyte-rich fraction, wherein preferably the PBMCs are from a patient in need of a therapy for SARS-CoV-2. Plating of PBMCs in a tissue culture flask permits adherence of monocytes. Treatment of these monocytes with interleukin 4 (IL-4) and granulocyte-macrophage colony stimulating factor (GM-CSF) leads to differentiation to immature DCs. Subsequent treatment with tumor necrosis factor (TNF), IL6, IL1B, and PGE2 further differentiates the immature DCs into mature DCs.

[0475] T cell epitopes and/or peptides disclosed herein can be loaded on an APC in vitro at various stages of differentiation.

[0476] In a conventional loading process, the APC is a DC generated by briefly (typically for 1-3 hours) pulsing mature DCs with one or more T cell epitope or peptide disclosed herein. This method loads peptides directly onto MHC I and MHC II on the cell surface.

[0477] In a preloading method, monocytes, immature DCs, or cells prior to becoming mature DC are contacted with one or more T cell epitope or peptide disclosed herein. The cells are induced to internalize and proteolytically process the peptides into shorter fragments for subsequent loading onto MHC class I and/or MHC class II. The processed peptides may be stored by the monocytes and/or immature DCs during the differentiation and/or maturation process and subsequently loaded onto the MHC by the resulting mature DCs. Without wishing to be bound by theory, it is believed that when loaded with 15-mers, most peptides are processed to 8-11 amino acids in length and presented on DCs. Preloading uses intracellular processing of peptides to present peptides that are MHC I allele-specific and thus, can result in a more robust stimulation of a physiologically relevant CD8+ T cell repertoire that can bind peptide:MHC complexes better and more effectively. Furthermore, using preloading, the peptides may be customized by the cell via proteolysis (which may be different across patients), so that the most biologically preferred peptides are loaded regardless of MHC allele.

[0478] In certain embodiments, the present disclosure provides a composition comprising a mixture of conventionally loaded DCs and preloaded DCs, and methods for making and using the same. In certain embodiments, the method of preparing APC comprises a preloading process followed by a conventional loading process after cell differentiation, wherein one or more T cell epitopes and/or peptides disclosed herein are used in the preloading process, the conventional loading process, or both.

[0479] In another embodiment, the APC is a cell of the lymphoid lineage, for example, B cell.

[0480] Also provided herein is a population of APCs presenting the T cell epitopes and/or peptides disclosed herein. In certain embodiments, the population comprises cells of the myeloid lineage. In certain embodiments, the population comprises cells of the lymphoid lineage. In certain embodiments, the population comprises cells of the myeloid lineage and cells of the lymphoid lineage.

[0481] In certain embodiments, the disclosure provides a method of making an APC with a T cell epitope on the surface of an APC. The method comprises contacting the APC in vitro with a peptide or composition disclosed herein. In certain embodiments, the composition comprises an agent (e.g., liposome or lipid nanoparticle) to deliver the peptide into the cytoplasm, thereby allowing the peptide to be presented by a MHC Class I protein. In other embodiments, the composition does not comprise an agent that delivers the peptide into the cytosol. In one embodiment, the peptide consists of or consists essentially of an MHC Class I-restricted epitope. Such peptide can be loaded directly on the MHC Class I on the cell surface. In another embodiment, the peptide comprises an MHC Class II-restricted epitope. Such peptide can be internalized into the endosome, then processed and presented by an MHC Class II protein. In certain embodiments, the APC expresses an MHC cognate to the epitope in the peptide.

[0482] In certain embodiments, the disclosure provides a method of presenting a T cell epitope on the surface of an APC. The method comprises transfecting the APC in vitro with a nucleic acid (e.g., mRNA) encoding a peptide disclosed herein. In certain embodiments, the peptide is expressed in the cytosol and presented by MHC Class I. In certain embodiments, the peptide is secreted into the extracellular space and is presented by MHC Class I or Class II as described above in connection with contacting the APC in vitro with a peptide. In certain embodiments, the APC expresses an MHC cognate to the epitope in the peptide encoded by the nucleic acid.

[0483] In addition, it is contemplated that the APCs can be included in a pharmaceutical composition that further comprises a pharmaceutically acceptable carrier or excipient.

### VII. T Cell Receptors

[0484] Also disclosed herein are recombinant T cell receptors (TCRs) reactive to SARS-CoV-2 T cell epitopes and fragments of the TCRs that bind the SARS-CoV-2 T cell epitopes. Methods for making and using engineered TCRs (e.g., soluble and membrane bound forms) and T cells (e.g., CD4+ T cells and CD8+ T cells) that express on their cell surface engineered TCRs are known in the art. See, e.g., US 2020/0207849, US 2021/0101955, US 2021/0101975 and US 2021/013043.

[0485] In certain embodiments, the recombinant TCR or the fragment thereof comprises an alpha chain variable domain (Vα) and a beta chain variable domain (Vβ), wherein the Vα and the Vβ comprise an alpha chain CDR3 and an beta chain CDR3 having the amino acid sequences set forth in the same line of TABLE 5. In certain embodiments, the Vα comprises the CDR1 and CDR2 sequences of the alpha V gene in the same line of TABLE 5, and the Vβ comprises the CDR1 and CDR2 sequences of the beta V gene in the same line of TABLE 5. In certain embodiments, the Vα comprises an amino acid sequence at least 90% (e.g., at least 91%, at least 92%, at least 93%, at least 94%, at least 95%, at least 96%, at least 97%, at least 98%, at least 99%, or 100%) identical to the Vα portion of an amino acid sequence encoded by the corresponding alpha chain nucleotide sequence in TABLE 6, and the Vβ comprises an amino acid sequence at least 90% (e.g., at least 91%, at least 92%, at least 93%, at least 94%, at least 95%, at least 96%, at least 97%, at least 98%, at least 99%, or 100%) identical to the VP portion of an amino acid sequence encoded by the corresponding beta chain nucleotide sequence in TABLE 6.

[0486] The present disclosure further provides proteins comprising the TCR fragments, such as soluble TCRs, bispecific T-cell engagers, and TCR mimetics (see Chandran and Klebanoff (2019) Immunol. Rev. 290:127-47; Goebeler and Bargou (2020) Nat. Rev. Clin. Oncol. 17:418-34). These proteins are useful for therapeutic as well as diagnostic purposes.

### VIII. T Cells

[0487] The peptide or compositions disclosed herein can be used to produce T cells sensitized to the T cell epitope presented to the T cell via an APC.

[0488] In one embodiment, the disclosure provides a population of activated and/or expanded T cells produced by a method disclosed herein. The activated T cells can be isolated or enriched.

[0489] In certain embodiments, the disclosure provides a composition comprising an isolated T cell (e.g., CD8+ T cell) that binds a peptide comprising a SARS-CoV-2 T cell epitope (CD8+ epitope) comprising an amino acid sequence set forth in TABLE 1, wherein the peptide is no more than 100 amino acids in length, and an optional pharmaceutically acceptable carrier. Alternatively or in addition, the composition comprises an immunodominant T cell epitope set forth in TABLE 2. Alternatively or in addition, the T cell epitope is specific for a subject infected with SARS-CoV-2 as denoted in TABLE 2 as the T cell epitope is present in convalescent patients but not in patients not exposed to SARS-CoV-2. In certain embodiments, the T cell epitope comprises at least 8 continuous amino acids of an epitope sequence set forth in TABLE 1 or 2. The composition may comprises a plurality of different T cells. For example, the composition can comprise a second, different T cell that binds a second, different peptide comprising a SARS-CoV-2 T cell epitope, wherein the second, different epitope optionally comprises an amino acid sequence set forth in any one of TABLES 1-4, and wherein the peptide is no more than 100 amino acids in length.

[0490] In certain embodiments, the disclosure provides a composition comprising an isolated T cell (e.g., CD4+ T cell) that binds a peptide comprising a SARS-CoV-2 T cell epitope (CD4+ epitope) comprising an amino acid sequence set forth in TABLE 3, wherein the peptide is no more than 100 amino acids in length, and an optional pharmaceutically acceptable carrier. In certain embodiments, the T cell epitope comprises at least 13 continuous amino acids of an epitope sequence set forth in TABLE 3. The composition may comprises a plurality of different T cells. For example, the composition can comprise a second, different T cell that binds a second, different peptide comprising a SARS-CoV-2 T cell epitope, wherein the second, different epitope optionally comprises an amino acid sequence set forth in any one of TABLES 1-4, and wherein the peptide is no more than 100 amino acids in length.

[0491] In each of the foregoing embodiments, the peptide is no more than 50, 45, 40, 35, 30, 25 or 20 amino acids in length. Alternatively or in addition, the T cell epitope is synthetic. In each of the foregoing embodiments, the APC is a dendritic cell, monocyte, macrophage, B cell or an artificial APC.

[0492] Methods for making T cells are well known in the art and disclosed, for example, in International Application Publication Nos. WO/2020/055931 and WO/2020/198366 and U.S. Patent Application Publication No. 2019/0264176.

[0493] T cells can be obtained from various sources such as PBMCs. It is understood that for activation and expansion, the T cells need not be isolated or purified from PBMCs. Rather, crude PBMCs or a lymphocyte-rich fraction thereof can be stimulated by APCs. Alternatively, T cells can be isolated or enriched using one or more T cell markers (e.g., CD3). In certain embodiments, a subset of T cells (e.g., CD4+ helper T cells such as T_{H}1 cells, CD8+ cytotoxic T cells, regulatory T cells) are isolated or enriched. In further embodiments, a subset of T cells reactive to SARS-CoV-2 can be isolated or enriched using an MHC multimer comprising a peptide and its cognate MHC disclosed herein. It is contemplated that other than APCs, T cells can also be stimulated by immobilized peptides or soluble peptides in complex with the cognate MHCs.

[0494] In certain embodiments, the activated T cell population is prepared by co-culturing a lymphocyte-rich fraction of the PBMCs with the APCs disclosed herein (e.g., at a ratio between about 40:1 to about 1:1, e.g., about 20:1 or 10:1) to expand the T cells that are reactive to SARS-CoV-2 epitopes. The cells can be co-cultured in the presence of one or more of IL-2, IL-6, IL-7, IL-12, IL-15 and IL-21. In some embodiments, the cells are co-cultured in the presence of IL-15, IL-12 and optionally one or more of IL-2, IL-21, IL-7 and IL-6. Advantageously, using methods and compositions disclosed herein, the entire process time from PBMCs to T cells can be shortened to 10-20 days, whereas conventional methods typically require at least 20 days (see, e.g., Putz et al. (2005) Methods Mol Med. 109:71-82, incorporated herein by reference in its entirety). The resulting T cells can be used in various T-cell therapies as further disclosed herein.

[0495] In certain embodiments, PBMCs can be stimulated directly with one or more T cell epitopes and/or peptides disclosed herein to activate antigen-specific T cells by the APCs in the PBMCs. This method does not require a separate step of preparing APCs presenting SARS-CoV-2 epitopes in a separate population. In certain embodiments, PBMCs are cultured in the presence of the one or more T cell epitopes and/or peptides. In certain embodiments, PBMCs are transduced with one or more nucleic acids encoding the one or more T cell epitopes and/or peptides.

[0496] In certain embodiments, the T cells are stimulated by the APCs more than once (e.g., twice, three times, or more). Progressive expansion can be achieved with weekly restimulation. The cell culture can include cytokines that promote proliferation and/or inhibiting cell death, for example, IL-2, IL-7, and/or IL-4. In certain embodiments, the T cells are cultured ex vivo in the presence of IL-7 and IL-4. In certain embodiments, the T cells are expanded in cell culture for 9 days, 10 days, 11 days, 12 days, 13 days, 14 days, 15 days, 16 days, 17 days, 18 days, 19 days, or 20 days of culture.

[0497] In certain embodiments, the T cells reactive to SARS-CoV-2 epitopes are further loaded with a cytokine on the cell surface. Suitable cytokines, which increases T cell survival, activity, or memory formation, include but are not limited to IL-15, IL-2, IL-7, IL-10, IL-12, IL-18, IL-21, IL-23, IL-4, IL-6, IL-7, IL-27, IL-1α, IL-1β, IL-5, IFNγ, TNFα, IFNα, IFNβ, GM-CSF, GCSF, and variants thereof. In certain embodiments, the cytokine is linked to a moiety that binds a T cell antigen (see International Application Publication No. WO/2019/010219). In certain embodiments, the cytokine is cross-linked into a protein nanogel (see International Application Publication No. WO/2019/050978). In certain embodiments, the T cells are loaded with two or more cytokines (see International Application Publication No. WO/2020/205808).

[0498] In another embodiment, provided is a method of activating a T cell for reactivity to a SARS-CoV-2 antigen. The method comprises contacting a T cell with at least one SARS-CoV-2 T cell epitope of the disclosure, complexed with an MHC molecule, such that the T cell is activated for reactivity to the SARS-CoV-2 T cell epitope. The T cell epitope-MHC molecule complex is such that it effectively presents the SARS-CoV-2 T cell epitope to the T cell. In one embodiment, the T cell epitope-MHC molecule complex is an MHC multimer loaded with the T cell epitope. In another embodiment, the T cell epitope-MHC molecule complex is displayed on a cell surface for presentation of the antigen to the T cells.

[0499] In addition, it is contemplated that the T cells can be included in a pharmaceutical composition that further comprises a pharmaceutically acceptable carrier or excipient. For example, the disclosure also provides isolated T cells activated in vitro for reactivity to at least one SARS-CoV-2 T cell epitope using methodologies described herein, and a pharmaceutically acceptable carrier. The resulting T cells can be used in a method for treating a subject with COVID-19. The method comprises administering to the subject isolated cells that have been activated in vitro for reactivity to at least one SARS-CoV-2 T cell epitope.

### IX. Pharmaceutical Compositions and Therapeutic Methods

[0500] The present invention also features pharmaceutical compositions that contain a therapeutically effective amount of one or more T cell epitopes, peptides, APCs, or T cells described herein. The composition can be formulated for use in a variety of drug delivery systems. One or more physiologically acceptable excipients or carriers can also be included in the composition for proper formulation.

### Vaccines

[0501] The SARS-CoV-2 T cell epitopes can be used to design prophylactic or therapeutic vaccines comprising such composition (e.g., pharmaceutical compositions) for immunizing subjects at risk of contracting, or subjects having already contacted, SARS-CoV-2. In certain embodiments, the vaccine is a subunit vaccine. In certain embodiments, the vaccine elicits a protective immune reaction against a plurality of viruses (e.g., SARS-CoV-1, HCoV-OC43, HCoV-HKU1, HCoV-229E, HCoV-NL63, CMV, EBV, and/or Influenza).

[0502] A vaccine composition of the disclosure can comprise a peptide composition(s) comprising the T cell epitope(s). Alternatively, a vaccine composition of the invention can comprise a nucleic acid composition, e.g., an RNA composition or DNA composition, encoding the T cell epitope(s). For such nucleic acid vaccines, suitable regulatory sequences are included such that the peptide epitope is expressed from the nucleic acid (RNA or DNA) in cells of the subject being immunized.

[0503] In certain embodiments, the vaccine of the disclosure comprises at least one SARS-CoV-2 T cell epitope peptide such that the vaccine stimulates a T cell immune response when administered to a subject. In various embodiments, the vaccine comprises, e.g., at least one SARS-CoV-2 T cell epitope peptide(s), e.g., comprising a sequence shown in any of TABLES 1-4, and/or combinations thereof. In certain embodiments, the composition comprises two or more (e.g., three or more, four or more, five or more, six or more, seven or more, eight or more, nine or more, ten or more, 11 or more, 12 or more, 13 or more, 14, or more, 15 or more, 16 or more, 17 or more, 18 or more, 19 or more, or 20 or more) of the peptides disclosed herein (e.g., set forth in TABLES 1-4). In certain embodiments, the two or more peptides are derived from the same SARS-CoV-2 antigen. In certain embodiments, the two or more peptides are derived from at least two different SARS-CoV-2 antigens. In certain embodiments, the vaccine comprises two or more SARS-CoV-2 T cell epitope peptides derived from the same SARS-CoV-2 antigen. In certain embodiments, the vaccine comprises two or more SARS-CoV-2 T cell epitope peptides derived from at least two different SARS-CoV-2 antigens. In certain embodiments, the vaccine comprises one or more, or two or more, SARS-CoV-2 T cell epitope peptides derived from one or more, or at least two or more, SARS-CoV-2 antigens selected from the group consisting of ORF1AB, Spike protein, N protein, M protein, 3A protein and E protein. In certain embodiments, the two or more peptides collectively recognize MHC molecules in at least 50%, at least 60%, at least 70%, at least 80%, at least 90%, at least 95%, or at least 99% of the human population. In certain embodiments, the vaccine contains individualized components according to the personal need (e.g., MHC variants) of the particular patient.

[0504] In one embodiment, the vaccine comprises one or more SARS-CoV-2 T cell epitope peptides in addition to one or more conformational epitopes recognized by anti-SARS-CoV-2 antibodies.

[0505] A vaccine composition of the disclosure can comprise one or more short (e.g., 8-35 amino acids) peptides as the immunostimulatory agent. In certain embodiments, a T cell epitope sequence is incorporated into a larger carrier polypeptide or protein, to create a chimeric carrier polypeptide or protein that comprises the T cell epitope(s). This chimeric carrier polypeptide or protein can then be incorporated into the vaccine composition.

[0506] It is understood that a peptide can be expressed from a nucleic acid (e.g., an mRNA) in a cell of the subject. Exemplary methods of producing peptides by translation in vitro or in vivo are described in U.S. Patent Application Publication No. 2012/0157513 and He et al., J. Ind. Microbiol. Biotechnol. (2015) 42(4):647-53. The present disclosure provides a composition (e.g., pharmaceutical composition) comprising one or more nucleic acids (e.g., mRNAs) encoding one or more peptides disclosed herein, optionally further comprising a pharmaceutically acceptable carrier or excipient. In certain embodiments, the composition comprises nucleic acid sequences encoding two or more (e.g., three or more, four or more, five or more, six or more, seven or more, eight or more, nine or more, ten or more, 11 or more, 12 or more, 13 or more, 14, or more, 15 or more, 16 or more, 17 or more, 18 or more, 19 or more, or 20 or more) of the peptides disclosed herein. In certain embodiments, the two or more peptides are derived from the same SARS-CoV-2 antigen. In certain embodiments, the two or more peptides are derived from at least two different SARS-CoV-2 antigens. In certain embodiments, the composition comprises a nucleic acid sequence encoding one or more of the T cell epitopes set forth in TABLES 1-4. In certain embodiments, the two or more peptides collectively recognize MHC molecules in at least 50%, at least 60%, at least 70%, at least 80%, at least 90%, at least 95%, or at least 99% of the human population. In certain embodiments, the vaccine contains individualized components according to the personal need (e.g., MHC variants) of the particular patient. In certain embodiments, each of the nucleic acids further comprises one or more expression control sequences (e.g., promoter, enhancer, translation initiation site, internal ribosomal entry site, and/or ribosomal skipping element) operably linked to one or more of the peptide coding sequences.

[0507] The compositions (e.g., pharmaceutical compositions) disclosed herein may be formulated for delivery into cells (e.g., APCs, such as dendritic cells, monocytes, macrophages, or artificial APCs). In certain embodiments, the composition comprises an agent that facilitate transfection in vitro or in vivo, such as a liposome or a nanoparticle (e.g., lipid nanoparticle). In certain embodiments, the liposome or nanoparticle further comprises a binding moiety (e.g., an antibody or an antigen-binding fragment thereof) for delivering the liposome or nanoparticle to a target T cell (e.g., a professional APC). Another delivery method employs virus particles (e.g., adenovirus, adeno-associated virus, vaccinia virus, fowlpox virus, self-replicating alphavirus, marabavirus, or lentivirus). In certain embodiments, the composition comprises a pharmaceutically acceptable carrier or excipient, such as a diluent, an isotonic solution, water, etc. Excipients also can be selected for enhancement of delivery of the composition.

[0508] APCs are also useful as vaccines. Such vaccines may be advantageous over peptide vaccines in avoiding immune tolerance (see Toes et al. (1998) J. Immunol. 160, 4449-56; Monzavi et al. (2021) Cellular Immunity 367: 104398). Accordingly, in certain embodiments, the composition or vaccine comprises one or more of the APCs disclosed herein.

[0509] In certain embodiments, the composition or vaccine comprises at least one immunogenicity enhancing adjuvant. Adjuvants included in the vaccine preparation are selected to enhance immune responsiveness to the T cell epitope(s) while maintaining suitable pharmaceutical delivery and avoiding detrimental side effects. Numerous adjuvants and excipients known in the art for use in T cell epitope vaccines can be evaluated for inclusion in the vaccine composition. Suitable adjuvants include any substance that, for example, activates or accelerates the immune system to cause an enhanced antigen-specific immune response. Examples of adjuvants that can be used in the present invention include mineral salts, such as calcium phosphate, aluminum phosphate and aluminum hydroxide; immunostimulatory DNA or RNA, such as CpG oligonucleotides; proteins, such as antibodies or Toll-like receptor binding proteins; saponins (e.g., QS21); cytokines; muramyl dipeptide derivatives; LPS; MPL and derivatives including 3D-MPL; GM-CSF (Granulocyte-macrophage colony-stimulating factor); imiquimod; colloidal particles; complete or incomplete Freund's adjuvant; Ribi's adjuvant or bacterial toxin e.g. cholera toxin or enterotoxin (LT). More adjuvants are disclosed by U.S. Pat. No. 10,772,915. The amounts and concentrations of adjuvants useful in the context of the present invention can be readily determined by the skilled artisan without undue experimentation.

[0510] A T cell immune response can be stimulated in vivo. In certain embodiments, the T cell immune response is stimulated in vivo in a patient, wherein the method comprises administering to the patient a peptide, nucleic acid, or composition (e.g., pharmaceutical composition) disclosed herein. It is understood that the peptide, nucleic acid, or composition can be given as a vaccine for therapeutic or prophylactic uses. Accordingly, in certain embodiments, the disclosure provides a method of stimulating an anti-SARS-CoV-2 T cell immune response in a subject, the method comprising administering a vaccine of the disclosure to the subject. In one embodiment, the patient is at risk of infection by SARS-CoV-2. In another embodiment, the patient has an acute infection by SARS-CoV-2. In another embodiment, the patient has a chronic or latent infection by SARS-CoV-2.

[0511] Suitable routes of administration and dosages for vaccines are known in the art and can be determined by a person of medical skill. In certain embodiments, the vaccine is administered parenterally, e.g., by intramuscular, intradermal, subcutaneous, intravenous, topical, nasal, or local administration. In certain embodiments, the vaccine comprising peptide(s) is administered via skin scarification. In certain embodiments, the vaccine comprising peptide(s) is administered at a dosage of 0.1-10 mg, e.g., 0.1-0.5 mg, 0.5-1 mg, 1-3 mg, 1-5 mg, or 5-10 mg of total amount per human patient. In certain embodiments, the vaccine comprises a plurality of different peptides, wherein each peptide is provided at a dosage of 0.01-0.05 mg, 0.05-0.1, or 0.1-0.5 mg per human patient. Stimulation of an anti-SARS-CoV-2 T cell immune response in a subject by the vaccine can be monitored by methods established in the art, e.g., by isolating T cells from the subject and measuring reactivity of the T cells to the SARS-CoV-2 T cell epitope(s) contained within the vaccine (see, e.g., Section X below).

### T Cell Therapies

[0512] The disclosure facilitates the use of SARS-CoV-2 T cell epitopes described herein for designing T cell-mediated therapies to treat COVID-19. In certain embodiments, the T cells described herein (e.g., obtained by contacting with APCs) are useful as T cell therapy. In certain embodiments, the T cell therapy comprises a plurality of (e.g., 2, 3, 4, 5, 6, 7, 8, 9, 10, or more) clonally different T cells. In certain embodiments, the T cell therapy comprises T cells reactive to a plurality of (e.g., 2, 3, 4, 5, 6, 7, 8, 9, 10, or more) SARS-CoV-2 T cell epitopes.

[0513] Alternatively, a TCR disclosed herein can be used as part of a therapeutic intervention. For example, a TCR sequence, TCR variable region sequence, or CDR sequence can be transfected or transduced into T cells to generate modified T cells of the same antigenic specificity. The modified T cells can be expanded, polarized to a desired effector phenotype (e.g., T_{H}1, Tc1, Treg), and infused into a subject. In some embodiments, multiple TCRs identified using compositions and methods disclosed herein are used in an oligoclonal therapy.

[0514] In certain embodiments, T cells are engineered to express one or more recombinant TCRs reactive to one or more SARS-CoV-2 T cell epitopes. For example, the SARS-CoV-2 T cell epitopes identified by the methods described herein can be used in designing recombinant TCRs for use in TCR-T or CAR-T technology. In the CAR-T technology, a chimeric antigen receptor (CAR) is used to confer T cells the ability to target a specific epitope, e.g., a SARS-CoV-2 T cell epitope, identified by the methods described herein. In the TCR-T technology, a TCR is used to confer T cells the ability to target a specific epitope, e.g., a SARS-CoV-2 T cell epitope. Methods for expressing a TCR in T cells are known in the art (see, e.g., U.S. Pat. No. 11,033,584). Methods for preparing TCR-transgenic T cells are known in the art and disclosed, for example, by Rath and Arber (2020) Cells 9:1485 and Xu et al. (2020) J. Cellular Immunol. 2(6):284-88). In certain embodiments, the T cell therapy comprises T cells having a plurality of (e.g., 2, 3, 4, 5, 6, 7, 8, 9, 10, or more) of different TCRs disclosed herein.

[0515] In certain embodiments, the T cells are transfected with one or more nucleic acids encoding a TCR disclosed herein (see, e.g., Section VII above). In certain embodiments, each of the nucleic acids further comprises one or more expression control sequences (e.g., promoter, enhancer, translation initiation site, internal ribosomal entry site, and/or ribosomal skipping element) operably linked to one or more of the TCR coding sequences.

[0516] The T cell therapy is particularly useful for treating patients who are not able to generate sufficient T cells by the vaccination methods disclosed herein. Such patients include but are not limited to immunocompromised individuals, lymphopenic individuals, and patients with low pre-existing COVID-specific T cells.

[0517] The T cells disclosed herein, expressing an anti-SARS-CoV-2 TCR either recombinantly or from the genome, can be genetically modified for increased survival, increased and/or prolonged activity, and reduced interference from other therapies commonly used for COVID-19 treatment. For example, in certain embodiments, the T cells can be genetically engineered to inactivate or reduce the expression level of an immune suppressor such as an immune checkpoint protein. Exemplary immune checkpoint proteins expressed by wild-type T cells include but are not limited to PD-1, CTLA-4, A2AR, B7-H3, B7-H4, BTLA, KIR, LAG3, TIM-3, TIGIT, VISTA, PTPN6 (SHP-1), and FAS. In certain embodiments, the T cells can be genetically modified to inactivate or reduce the expression level of the glucocorticoid receptor gene (NR3C1), thereby rendering the T cells insensitive to corticosteroid, which is useful for managing severe COVID-19 (see Basar et al. (2021) Cell Reports 36:109432).

[0518] The T cells disclosed herein have therapeutic or prophylactic uses as adoptive cell therapies. For example, they can be used for treating SARS-CoV-2 infection. Accordingly, the present invention provides a method of stimulating a T cell immune response to SARS-CoV-2 in a subject, the method comprising administering to the subject a composition comprising a population of activated T cells disclosed herein. The disclosure also provides a method of stimulating a T cell immune response to SARS-CoV-2 in a subject, the method comprising administering to the subject a composition comprising T cells disclosed herein (e.g., T cells engineered to express a TCR). Where the subject has been infected with SARS-CoV-2, the method can be used to ameliorating a symptom of SARS-CoV-2 infection in the subject.

[0519] In certain embodiments, the patient has an acute infection by SARS-CoV-2. In certain embodiments, the patient has a chronic or latent infection by SARS-CoV-2. In certain embodiments, the subject is at risk of infection by SARS-CoV-2. The cell therapy can be provided in a MHC matching manner. For example, in certain embodiments, the T cells are reactive to an epitope-MHC complex wherein the patient has the same MHC allele. In certain embodiments, the T cells are generated by contacting with an epitope-MHC complex wherein the patient has the same MHC allele. In certain embodiments, the cell therapy is autologous, i.e., the T cells were obtained from the same subject. In other embodiments, the cell therapy is allogeneic, i.e., the T cells are obtained from another subject (e.g., a healthy donor).

[0520] Suitable routes of administration and dosages for T cell therapies are known in the art and can be determined by a person of medical skill. In certain embodiments, the T cell therapy is administered by intravenous infusion. In certain embodiments, the T cell therapy is administered at a dosage of 10⁴ to 10⁹ cells/kg body weight, e.g., 10⁵ to 10⁶ cells/kg body weight. In certain embodiments, the T cell therapy is administered at a dosage of 10⁶ to 10⁸ cells/m² of body surface area, e.g., 5×10⁶ to 5×10⁷ cells/m² of body surface area. Anti-SARS-CoV-2 T cell immune response in a subject by the vaccine can be monitored by methods established in the art, e.g., by isolating T cells from the subject and measuring reactivity of the T cells to the SARS-CoV-2 T cell epitope(s) contained within the vaccine (see, e.g., Section X below).

### X. Diagnostic Methods

[0521] It is contemplated that the T cell epitopes and their corresponding APCs and T cells can be used in a variety of diagnostic and prognostic approaches. For example, information about a given T cell epitope or group of T cell epitopes and corresponding T cells can be used to determine whether a subject has been infected with SARS-CoV-2, and, if infected, whether the subject is likely to have an acute response to the infection, which may impact patient treatment. In some embodiments, the compositions and methods disclosed herein are used to guide clinical decision making, e.g. treatment selection, identification of prognostic factors, monitoring of treatment response or disease progression, or implementation of preventative measures. For example, the sequences identified as COVID-specific in TABLE 2 can be used to determine if a subject or patient has COVID-19. In certain embodiments, a cutoff of frequency can be established in which a patient is diagnosed as having COVID-19 if a certain number of COVID-19-specific T cells are detected from a patent sample.

[0522] Furthermore, information about a given T cell epitope or group of T cell epitopes and corresponding T cells can be used to determine whether a subject may elicit a more desirable immune response to one therapeutic agent over another. For example, the information (e.g., sequences) described herein and associated clinical data from a patient can permit the identification of features, for example, biomarkers, that indicated whether a person is likely to be asymptomatic or if they will develop symptoms of COVID-19, e.g., severe symptoms.

[0523] Using the information provided herein, it is possible to identify a T cell immune response in a COVID-19 patient. The method comprises contacting a sample of T cells from the COVID-19 patient with a MHC multimer library described herein and identifying a T cell within the sample that binds to at least one member of the MHC multimer library to thereby identify a T cell immune response in the COVID-19 patient. The method can further comprise determining the sequence of the peptide(s) loaded onto the MHC multimer(s) to which the T cell binds to thereby determine the antigenic specificity of the T cell response in the COVID-19 patient. The method can further comprise selecting a treatment regimen for the COVID-19 patient based on the antigenic specificity of the T cell response in the COVID-19 patient. It is contemplated that such a method can be conducted on a plurality of COVID-19 patients, and the resulting information can be used to identify a patient subpopulation having an antigen-specific T cell response of interest.

### T Cell Detection

[0524] It is contemplated that a given T cell population, e.g., a T cell population described herein (see, e.g., Tables 1-4), can be detected using a variety of approaches.

[0525] a. Nucleic Acid Amplification and Sequencing

[0526] In some embodiments, the identity and quantification of a TCR on a selected T cell or population of T cells can be determined by nucleic acid amplification and sequencing (e.g., sequencing a variable, hypervariable region or complementarity determining region (CDR) of a TCR, e.g., alpha and/beta chain CDR3 sequences). Methods of nucleic acid amplification are known in the art and include, for example, PCR, qPCR, nicking endonuclease amplification reaction (NEAR), transcription mediated amplification (TMA), loop-mediated isothermal amplification (LAMP), helicase dependent amplification (HAD), and strand displacement amplification (SDA). In some embodiments, following nucleic acid amplification, the identity of the peptide of the pMHC that binds to a TCR is determined by sequencing (e.g., using an identifier as disclosed herein). Sequencing can be performed, for example, using any suitable sequencing method or instrument known in the art, including an Illumina NextSeq550 instrument (San Diego, Calif., USA). Sequencing data can be processed using any suitable software (e.g., the Cell Ranger Software Suite).

[0527] b. Flow Cytometry

[0528] MHC multimers using the peptides disclosed herein can be used for detection of individual T cells in fluid samples using flow cytometry or flow cytometry-like analysis.

[0529] MHC multimers can be used to identify antigen-specific T cells of interest, for example by screening a plurality of T cells with a library of MHC multimers. In various embodiments, the library comprises MHC multimers loaded with a diversity of more than 10, more than 100, more than 500, more than 1000, more than 2,000, more than 5,000, more than 10,000, more than 10⁶, more than 10⁷, more than 10⁸, more than 10⁹, or more than 10¹⁰ unique peptides. The identification approach can comprise compartmentalizing a cell of the plurality of cells bound to a MHC multimer of the library in a single compartment, wherein the MHC multimer comprises a unique identifier; and determining the unique identifier for each MHC multimer bound to the compartmentalized cell. A compartment can be a separate space, e.g., a well, a plate, a divided boundary, a phase shift, a vessel, a vesicle, a cell, etc.

[0530] Liquid cell samples can be analyzed using a flow cytometer, able to detect and count individual cells passing in a stream through a laser beam. For identification of specific T cells using MHC multimers, cells are stained with fluorescently labeled MHC multimer by incubating cells with MHC multimer and then forcing the cells with a large volume of liquid through a nozzle creating a stream of spaced cells. Each cell passes through a laser beam and any fluorochrome bound to the cell is excited and thereby fluoresces. Sensitive photomultipliers detect emitted fluorescence, providing information about the amount of MHC multimer bound to the cell. By this method, MHC multimers can be used to identify individual T cells and/or specific T cell populations in liquid samples.

[0531] Cell samples capable of being analyzed by MHC multimers in flow cytometry analysis include, but are not limited to, blood samples or fractions thereof, T cell lines (hybridomas, transfected cells) and homogenized tissues like spleen, lymph nodes, tumors, brain or any other tissue comprising T cells.

[0532] When analyzing blood samples, whole blood can be used with or without lysis of red blood cells prior to analysis on a flow cytometer. Lysing reagent can be added before or after staining with MHC multimers. When analyzing blood samples without lysis of red blood cells, one or more gating reagents may be included to distinguish lymphocytes from red blood cells. Preferred gating reagents are marker molecules specific for surface proteins on red blood cells, enabling subtraction of this cell population from the remaining cells of the sample. As an example, a fluorochrome labelled CD45 specific marker molecule e.g., an antibody, can be used to set the trigger discriminator to allow the flow cytometer to distinguish between red blood cells and stained white blood cells.

[0533] Alternative to analysis of whole blood, lymphocytes can be purified before flow cytometry analysis, e.g., using standard procedures like a FICOLL®-Hypaque gradient. Another possibility is to isolate T cells from the blood sample, for example, by adding the sample to antibodies or other T cell-specific markers immobilized on solid support. Marker specific T cells will then be attached to the solid support, and following washing, specific T cells can be eluted. This purified T cell population can then be used for flow cytometry analysis together with MHC multimers.

[0534] T cells may also be purified from other lymphocytes or blood cells by rosetting. Human T cells form spontaneous rosettes with sheep erythrocytes also called E-rossette formation. E-rossette formation can be carried out by incubating lymphocytes with sheep red erythrocytes followed by purification over a density gradient, e.g., a FICOLL® Hypaque gradient.

[0535] Instead of actively isolating T cells, unwanted cells like B-cells, NK cells or other cell populations can be removed prior to the analysis. A method for removing unwanted cells is to incubate the sample with marker molecules specific or one or more surface proteins on the unwanted cells immobilized unto solid support. An example includes use of beads coated with antibodies or other marker molecule specific for surface receptors on the unwanted cells, e.g., markers directed against CD19, CD56, CD14, CD15 or others. Briefly, beads coated with the specific surface marker(s) are added to the cell sample. Non-T cells with appropriate surface receptors will bind the beads. Beads are removed by, e.g., centrifugation or magnetic withdrawal (when using magnetic beads) and the remaining cells are enriched for T cells.

[0536] Another example is affinity chromatography using columns with material coated with antibodies or other markers specific for the unwanted cells.

[0537] Alternatively, specific antibodies or markers can be added to the blood sample together with complement, thereby killing cells recognized by the antibodies or markers.

[0538] Various gating reagents can be included in the analysis. Gating reagents can be labeled antibodies or other labelled marker molecules identifying subsets of cells by binding to unique surface proteins or intracellular components or intracellular secreted components. Preferred gating reagents when using MHC multimers are antibodies and marker molecules directed against CD2, CD3, CD4, and CD8 identifying major subsets of T cells. Other preferred gating reagents are antibodies and markers against CD11a, CD14, CD15, CD19, CD25, CD30, CD37, CD49a, CD49e, CD56, CD27, CD28, CD45, CD45RA, CD45RO, CD45RB, CCR7, CCR5, CD62L, CD75, CD94, CD99, CD107b, CD109, CD152, CD153, CD154, CD160, CD161, CD178, CDw197, CDw217, Cd229, CD245, CD247, Foxp3, or other antibodies or marker molecules recognizing specific proteins unique for different lymphocytes, lymphocyte populations or other cell populations. Also included are antibodies and markers directed against interleukins, e.g., IL-2, IL-4, IL-6, IL-10, IL-12, and IL-21; interferons e.g., INFγ, TNFα, and TNFβ, and other cytokines or chemokines.

[0539] Gating reagents can be added before, after or simultaneously with the addition of an MHC multimer to the sample. Following labelling with an MHC multimer and before analysis on a flow cytometer, stained cells can be treated with a fixation reagent (e.g., formaldehyde, ethanol or methanol) to cross-link bound MHC multimer to the cell surface. Stained cells can also be analyzed directly without fixation.

[0540] The flow cytometer can in one embodiment be equipped to separate and collect particular types of cells. This is called cell sorting. MHC multimers in combination with sorting on a flow cytometer can be used to isolate antigen specific T cell populations. Gating reagents as described above can be including further specifying the T cell population to be isolated. Isolated and collected specific T cell populations can then be further manipulated as described elsewhere herein, e.g., expanded in vitro.

[0541] Direct determination of the concentration of MHC-peptide specific T cells in a sample can be obtained by staining blood cells or other cell samples with MHC multimers and relevant gating reagents followed by addition of an exact amount of counting beads of known concentration. In general, the counting beads are microparticles with scatter properties that put them in the context of the cells of interest when registered by a flow cytometer. They can be either labelled with antibodies, fluorochromes or other marker molecules or they may be unlabeled. In some embodiments, the beads are polystyrene beads with molecules embedded in the polymer that are fluorescent in most channels of the flow cytometer. In connection with this assay, the terms “counting bead” and “microparticle” are used interchangeably.

[0542] Beads or microparticles suitable for use include those which are used for gel chromatography, for example, gel filtration media such as SEPHADEX®. Suitable microbeads of this sort include, but are not limited to, SEPHADEX® G-10 having a bead size of 40-120 μm (Sigma Aldrich catalogue number 27, 103-9), SEPHADEX® G-15 having a bead size of 40-120 μm (Sigma Aldrich catalogue number 27, 104-7), SEPHADEX® G-25 having a bead size of 20-50 μm (Sigma Aldrich catalogue number 27, 106-3), SEPHADEX® G-25 having a bead size of 20-80 μm (Sigma Aldrich catalogue number 27, 107-1), SEPHADEX® G-25 having a bead size of 50-150 μm (Sigma Aldrich catalogue number 27, 109-8), SEPHADEX® G-25 having a bead size of 100-300 μm (Sigma Aldrich catalogue number 27, 110-1), SEPHADEX® G-50 having a bead size of 20-50 μm (Sigma Aldrich catalogue number 27, 112-8), SEPHADEX® G-50 having a bead size of 20-80 μm (Sigma Aldrich catalogue number 27, 113-6), SEPHADEX® G-50 having a bead size of 50-150 μm (Sigma Aldrich catalogue number 27, 114-4), SEPHADEX® G-50 having a bead size of 100-300 μm (Sigma Aldrich catalogue number 27, 115-2), SEPHADEX® G-75 having a bead size of 20-50 μm (Sigma Aldrich catalogue number 27, 116-0), SEPHADEX® G-75 having a bead size of 40-120 μm (Sigma Aldrich catalogue number 27, 117-9), SEPHADEX® G-100 having a bead size of 20-50 μm (Sigma Aldrich catalogue number 27, 118-7), SEPHADEX® G-100 having a bead size of 40-120 μm (Sigma Aldrich catalogue number 27, 119-5), SEPHADEX® G-150 having a bead size of 40-120 μm (Sigma Aldrich catalogue number 27, 121-7), and SEPHADEX® G-200 having a bead size of 40-120 μm (Sigma Aldrich catalogue number 27, 123-3).

[0543] Other preferred particles for use in the methods and compositions described here comprise plastic microbeads. While plastic microbeads are usually solid, they may also be hollow inside and could be vesicles and other microcarriers. They do not have to be perfect spheres in order to function in the methods described here. Plastic materials such as polystyrene, polyacrylamide and other latex materials may be employed for fabricating the beads, but other plastic materials such as polyvinylchloride, polypropylene and the like may also be used.

[0544] The counting beads are used as reference population to measure the exact volume of analyzed sample. The sample(s) are analyzed on a flow cytometer and the amount of MHC-specific T cell is determined using, e.g., a predefined gating strategy and then correlating this number to the number of counted counting beads in the same sample.

[0545] Detection of specific T cells in a sample combined with simultaneous detection of activation status of T cells can also be measured using marker molecules specific for up- or down-regulated surface exposed receptors together with MHC multimers. The marker molecule and MHC multimer can be labelled with the same label or different labelling molecules and added to the sample simultaneously or sequentially or separately.

[0546] c. Microscopy

[0547] Another method of detecting individual T cells in fluid samples uses microscopy. Microscopy comprises any type of microscopy including optical, electron and scanning probe microscopy, bright field microscopy, dark field microscopy, phase contrast microscopy, differential interference contrast microscopy, fluorescence microscopy, confocal laser scanning microscopy, X-ray microscopy, transmission electron microscopy, scanning electron microscopy, atomic force microscope, scanning tunneling microscope and photonic force microscope.

[0548] In an exemplary approach, a suspension of T cells are added to MHC multimers. The sample is washed and then the amount of MHC multimer bound to each cell is measured. Bound MHC multimers may be labelled directly or measured through addition of labelled marker molecules. The sample is then spread out on a slide or similar in a thin layer able to distinguish individual cells and labelled cells identified using a microscope. Depending on the type of label different types of microscopes may be used, e.g. if fluorescent labels are used a fluorescent microscope is used for the analysis. For example, MHC multimers can be labeled with a fluorochrome or bound MHC multimer detected with a fluorescent antibody. Cells with bound fluorescent MHC multimers can then be visualized using e.g. an immunofluorescence microscope or a confocal fluorescence microscope.

[0549] d. Immunohistochemistry (IHC)

[0550] IHC is a method where MHC multimers can be used to directly detect specific T cells e.g. in sections of solid tissue. In some embodiments, sections of fixed or frozen tissue sample are incubated with MHC multimer allowing MHC multimer to bind specific T cells in the tissue. The MHC multimer may be labelled with a fluorochrome, chromophore, or any other labelling molecule that can be detected. The labeling of the MHC multimer may be directly or through a second marker molecule. As an example, the MHC multimer can be labelled with a tag that can be recognized by e.g. a secondary antibody, optionally labelled with horseradish peroxidase (HRP) or another label. The bound MHC multimer is then detected by its fluorescence or absorbance (for fluorophore or chromophore), or by addition of an enzyme-labelled antibody directed against this tag, or another component of the MHC multimer (e.g. one of the protein chains, a label on the one or more multimerization domain). The enzyme can be, e.g. HRP or alkaline phosphatase (AP), both of which convert a colorless substrate into a colored reaction product in situ. This colored deposit identifies the binding site of the MHC multimer and can be visualized under, e.g., a light microscope. The MHC multimer can also be directly labelled with, e.g., HRP or AP, and used in IHC without an additional antibody.

[0551] In some embodiments, the detection of T cells in solid tissue includes use of tissue embedded in paraffin, from which tissue sections are made and fixed in formalin before staining. Antibodies are standard reagents used for staining of formalin-fixed tissue sections; these antibodies often recognize linear epitopes. In contrast, most MHC multimers are expected to recognize a conformational epitope on the TCR. In this case, the native structure of TCR needs to be at least partly preserved in the fixed tissue.

[0552] e. Immunofluorescence Microscopy

[0553] In some embodiments, MHC multimers can be used to identify specific T cells in sections of solid tissue. Instead of visualization of bound MHC multimer by an enzymatic reaction, MHC multimers are labelled with a fluorochrome or bound MHC multimer are detected by a fluorescent antibody. Cells with bound fluorescent MHC multimers can be visualized in an immunofluorescence microscope or in a confocal fluorescence microscope. This method can also be used for detection of T cells in fluid samples using the principles described for detection of T cells in fluid sample described elsewhere herein.

[0554] f. Microchip MHC Multimer Technology

[0555] A microarray of MHC multimers can be formed by immobilization of different MHC multimers on solid support, to form a spatial array where the position specifies the identity of the MHC-peptide complex or specific empty MHC immobilized at this position. When labelled cells are passed over the microarray (e.g. blood cells), the cells carrying TCRs specific for MHC multimers in the microarray will become immobilized. The label will thus be located at specific regions of the microarray, which will allow identification of the MHC multimers that bind the cells, and thus, allows the identification of, e.g., T cells with recognition specificity for the immobilized MHC multimers. Alternatively, the cells can be labelled after they have been bound to the MHC multimers. The label can be specific for the type of cell that is expected to bind the MHC multimer, or the label can stain cells in general (e.g., a label that binds DNA). Alternatively, cytokine capture antibodies can be co-spotted together with MHC on the solid support and the cytokine secretion from bound antigen specific T cells analyzed. This is possible because T cells are stimulated to secrete cytokines when recognizing and binding specific MHC-peptide complexes.

[0556] The MHC multimers, and libraries thereof, can be used in a number of screening methods that allow for the convenient detection and quantification of antigen-specific binding to immune cell receptors. Such MHC multimer libraries can allow, for example, detection of T cells specific for a given antigen, multiplex detection of T cell specificities in a given sample, matching of TCR sequence with specificity (e.g., via single cell sequencing), comparative TCR affinity determination, determination of a consensus specificity sequence of a given TCR, or mapping of antigen responsiveness of T cells against sequences of interest. MHC multimer libraries may be used in T cell screens to determine antigen-reactive T cells as described, for example, in Simon et al. (2014) Cancer Immunol Res 2(12):1230-1244.

[0557] A non-limiting example of the method of identifying reactive T cells to SARS-CoV-2 T cell epitopes using an MHC multimer-based approach is described in further detail in Example 18. In another embodiment, T cells reactive to SARS-CoV-2 T cell epitopes are identified using an MCR system for Membrane Epitope Display, described in further detail below and exemplified in Example 17.

[0558] g. Indirect Detection of T Cells Using pMHC Multimers

[0559] T cells in a sample may also be detected indirectly using MHC multimers. In indirect detection, the number or activity of T cells is measured by detecting events that are the result of TCR-MHC-peptide complex interaction. Interaction between an MHC multimer and a T cell may stimulate the T cell, resulting in activation of the T cell, cell division and proliferation of T cell populations. Alternatively, interaction between an MCH multimer and a T cell may result in inactivation of a T cell.

[0560] Activation can be assessed by, for example, measuring the secretion of specific soluble factors (e.g., cytokines) using, e.g., flow cytometry as described herein; measurement of expression of activation markers, e.g., measurement of expression of CD27 and CD28 and/or other receptors by e.g. flow cytometry and/or ELISA or ELISA-like methods; and measurement of T cell effector function, e.g., using a CD8 T cell cytotoxicity assay to measure, e.g., chromium release, as is known by persons skilled in the art. In certain embodiments, activation of a T cell is measured using an Activation Induced Marker (AIM) assay, in which expression of activation markers, e.g., CD27 and CD28 and/or other receptors, are measured by, e.g., flow cytometry. In certain embodiments, activation of a T cell is assessed using an Enzyme Linked Immuno Spot Assay (ELISpot), which detects cytokine-secreting cells at the single cell level using a sandwich assay similar to ELISA.

[0561] Proliferation of T cell populations can be assessed by measuring mRNA, measuring incorporation of thymidine or incorporation of other molecules like bromo-2′-deoxyuridine (BrdU).

[0562] Inactivation of T cells can be assessed by measuring the effect of blockade of specific TCRs or measuring apoptosis.

[0563] When contacted with a diverse population of T cells, such as is contained in a sample of the peripheral blood lymphocytes (PBLs) of a subject, those tetramers containing pMHCs that are recognized by a T cell in the sample will bind to the matched T cell. The contents of the reaction are analyzed using fluorescence flow cytometry to determine, quantify and/or isolate those T cells having an MHC tetramer bound thereto.

[0564] h. Detection of T Cells in Solid Tissue In Vivo

[0565] MHC multimers may also be used to detect T cells in solid tissue in vivo. To detect T cells in vivo, labeled MHC multimers are injected into the body of the subject to be investigated. The MHC multimers may be labeled with, e.g., a paramagnetic isotope. Using a magnetic resonance imaging (MRI) scanner or electron spin resonance (ESR) scanner, MHC multimer binding T cells can then be measured and localized. In general, any conventional method for diagnostic imaging visualization can be utilized. Usually gamma and positron emitting radioisotopes are used for camera and paramagnetic isotopes for MRI.

[0566] i. Detection of T Cells Immobilized on Solid Support

[0567] In a number of applications, it may be advantageous to immobilize the T cell onto a solid or semi-solid support. Such support may be any which is suited for immobilization, separation, etc. Non-limiting examples include particles, beads, biodegradable particles, sheets, gels, filters, membranes (e.g., nylon membranes), fibers, capillaries, needles, microtiter strips, tubes, plates or wells, combs, pipette tips, microarrays, chips, slides, or indeed any solid surface material. The solid or semi-solid support may be labelled, if desired. The support may also have scattering properties or sizes, which enable discrimination among supports of the same nature, e.g., particles of different sizes or scattering properties, color or intensities.

[0568] An example of a method in which MHC multimers can be used for detection of immobilized T cells is an ELISA (Enzyme-Linked Immunosorbent Assay). ELISA is a binding assay originally used for detection of antibody-antigen interaction. Detection is based on an enzymatic reaction, and commonly used enzymes are, e.g., HRP and AP. MHC multimers can be used in ELISA-based assays for analysis of purified TCR's and T cells immobilized in wells of a microtiter plate. The bound MHC multimers can be labelled either by direct chemical coupling of, e.g., HRP or AP to the MHC multimer (e.g. the one or more multimerization domain or the MHC proteins), or e.g. by an HRP- or AP-coupled antibody or other marker molecule that binds to the MHC multimer. Detection of the enzyme-label occurs when a substrate (e.g. colorless) is added and turned into a detectable product (e.g. colored) by the HRP or AP enzyme.

[0569] The solid support may be made of, e.g., glass, silica, latex, plastic or any polymeric material. The support may also be made from a biodegradable material. Generally speaking, the nature of the support is not critical and a variety of materials may be used. The surface of support may be hydrophobic or hydrophilic. Non-magnetic polymer beads may also be applicable. Such are available from a wide range of manufactures, e.g., Dynal Particles AS, Qiagen, Amersham Biosciences, Serotec, Seradyne, Merck, Nippon Paint, Chemagen, Promega, Prolabo, Polysciences, Agowa, and Bangs Laboratories.

[0570] Another example of a suitable support is magnetic beads or particles. The term “magnetic” as used herein is intended to mean that the support is capable of having a magnetic moment imparted to it when placed in a magnetic field, and thus is displaceable under the action of that magnetic field. In other words, a support comprising magnetic beads or particles may readily be removed by magnetic aggregation, which provides a quick, simple and efficient way of separating out the beads or particles from a solution. Magnetic beads and particles may suitably be paramagnetic or superparamagnetic. Superparamagnetic beads and particles are e.g. described in EP 0 106 873. Magnetic beads and particles are available from several manufacturers, e.g., Dynal Biotech ASA (Oslo, Norway, previously Dynal AS, e.g., DYNABEADS).

### XI. Methods of Identifying T Cell Epitopes

### Chimeric MHC/T Cell Receptor System

[0571] One approach for identifying SARS-CoV-2 T cell epitopes is through the use of the MCR™ system, which is described further in WO2020/142720, WO2020/142722, WO2020/142724, WO2016/097334, WO2019/197671, and WO2020/079264, as well as Kisielow et al. (2019) Nat. Immunol. 20:652-662. In the MCR™ system, chimeric MHC/TcR receptors (MCR) are expressed on mammalian cells to display epitopes to T cells, wherein epitope binding triggers expression of a reporter gene in the cell expressing the chimeric MHC/TcR receptor. Cells are sorted based on fluorescence into multiple gates and higher scores are assigned to cells that preferentially get sorted into higher-fluorescence gates. FIG. 27 shows a schematic diagram of the chimeric MHC/TcR receptor used in the MCR™ system. FIG. 28 shows a schematic diagram of the steps of the MCR™ system for identifying T cell epitopes.

[0572] A non-limiting example of use of the MCR™ system to identify SARS-CoV-2 T cell epitopes is described in detail in Example 17. The MCR™ system can also be used to validate T cell epitopes. For example, the epitopes shown in SEQ ID NOs: 271-278 were assessed by this approach.

### Screening of Peptide-MHC Tetramers

[0573] Various approaches for preparing MHC multimers (e.g., tetramers) have been described in the art, which can be applied to the identification of SARS-CoV-2 T cell epitopes. MHC multimers have been used for detection of antigen-responsive T cells since Altman et al. (Science (1996) 274:94-96) showed that tetramerization of peptide-loaded MHC class I (pMHCI) molecules provided sufficient stability to T cell receptor (TCR)-pMHC interactions, allowing detection of fluorescently-labeled MHC multimer-binding T cells using flow cytometry. However, since MHC Class I molecules are largely unstable when they are not part of a complex with peptide, pMHCI-based technologies were initially restricted by the tedious production of molecules in which each peptide required an individual folding and purification procedure (Bakker et al. (2005) Curr. Opin. Immunol. 17:428-433).

[0574] More recently, a variety of MHCI molecules with covalently linked peptides have been reported (e.g., reviewed by Goldberg et al. (2011) J Cell. Mol. Med. 15:1822-1832). Several types of pMHCI microarrays systems also have been developed, but most work has focused on optimizing the supporting surface and modifying the conditions applied during binding and/or washing. The use of these systems is also limited due to poor detection limits and low reproducibility compared to existing cytometry-based analyses. For example, a general limitation to such array-based strategies is the propensity of a given T cell to pursue all potential pMHCI interactions displayed on a given array. As a consequence, the frequency of antigen-responsive T cells in the cell preparations typically needs to be >0.1% to allow a robust readout.

[0575] MHCI multimers, and libraries thereof, have been prepared using biotinylated peptide-MHCI monomers that then associate with the biotin-binding site on streptavidin to form tetramers (see e.g., Leisner et al. (2008) PLoS One 3(2):e1678). For the creation of MHC Class I libraries, approaches have been described in which oligonucleotide barcode labels have been conjugated to the streptavidin. However, existing strategies involve complex and/or costly approaches that limit the facile production of large libraries. For example, in one approach, individual streptavidin precursors must be barcoded individually by overlap extension PCR prior to tetramerization of biotinylated peptide-HLA monomers (Zhang et al. (2018) Nature Biotech. doi:10.1038.nbt.4282). In another approach, streptavidin-conjugated dextran, which is a costly reagent, is used to create a dextramer to which both the biotinylated peptide-HLA monomers and the biotinylated barcode oligonucleotide are complexed (Bentzen et al. (2016) Nature Biotech. 34:10: 1037-1045) via the streptavidin conjugated to the dextran backbone.

[0576] Similar to the approach with pMHCI tetramers, soluble MHC class II molecules also have been used to prepare pMHCII tetramers, which have been used in the study of the antigenic specificity of CD4+ T helper cells (as reviewed in, for example, Nepom et al. (2002) Arthrit. Rheumat. 46:5-12; Vollers and Stern (2008) Immunol. 123:305-313; Cecconi et al. (2008) Cytometry 73A:1010-1018). Typically, to prepare pMHCII multimers, soluble biotinylated MHCII α/β dimers are recombinantly expressed and then tetramerized by binding to streptavidin or avidin through their biotin-binding sites. Fluorescent labeling of the streptavidin or avidin then allows for isolation of T cells that bind the pMHCII multimers by flow cytometry. With regard to antigenic peptide loading of the MHCII molecules, in one approach, a peptide is attached to the MHCII α/β dimers covalently. Some groups have generated pMHCII loaded with a covalent but cleavable “stuffer” peptide that can be exchanged with a peptide of interest under acidic conditions (Day et al., (2003) J. Clin Invest. 112(6):831-842).

[0577] In an alternative approach, “empty” MHCII α/β dimers are prepared and then loaded with soluble MHCII-binding peptides (see e.g., Novak et al. (1999) J Clin. Invest. 104:63-67; Nepom et al. (2002) Arthrit. Rheumat. 46:5-12; Macaubus et al. (2006) J. Immunol. 176:5069-5077). While this approach allows for greater diversity of peptide loading onto the MHCII α/β dimers, the ability to recombinantly express stable “empty” MHCII α/β dimers is limited, thus again hampering the preparation of large scale pMHCII multimer libraries. For example, production of “empty” MHCII α/β dimers by refolding from E. coli inclusion bodies or by insect T cell or mammalian cell expression has been reported, but with yields that are too low to support high throughput methods (reviewed in Vollers and Stern (2008) Immunology 123: 305-313).

[0578] Additionally, this disclosure provides an alternative method for preparing MHC multimers, which method provides for the high-throughput generation of libraries containing peptide-loaded MHC (pMHC) multimers containing a plurality of unique peptides in the MHC binding groove and having oligonucleotide barcode labeling to facilitate identification of library members. In the methods provided herein, all of the challenging and potentially inefficient chemistry steps for generation of pMHC multimers are done in a single bulk reaction including chromatographic cleanup and purification, followed by highly efficient peptide exchange and oligonucleotide barcoding. In particular, pMHC monomers are linked to the multimerization domain through the use of conjugation moieties on the monomers and the multimerization domain that react to form a stable chemical linkage (i.e., covalent bond) between the monomers and the multimerization domain, thereby forming a pMHC Conjugated Multimer, such as a pMHC Conjugated Tetramer. Various conjugation moieties and reactions are suitable for use in forming the Conjugated Multimers, as described herein, including use of bioorthogonal chemistry, such as click chemistry, that allow for ease and efficiency of the reactions. Moreover, when the multimerization domain is streptavidin, since the biotin-binding site is not being used for attaching the pMHC monomers, this biotin-binding site is thus available for convenient attachment of biotinylated oligonucleotide barcodes, to thereby label the multimers easily and efficiently.

[0579] The libraries of pMHC multimers provided herein are useful in a range of therapeutic, diagnostic, and research applications, essentially in any situation in which pMHC multimers are useful. For example, pMHC multimers as described herein can be used in a variety of methods, for example, to identify and isolate specific T cells in a wide array of applications. In one embodiment, the pMHC multimers are pMHC Class I multimers, which are useful for determining the antigenic specificity of CD8+ T cells (e.g., cytotoxic T cells). In another embodiment, the pMHC multimers are pMHC Class II multimers, which are useful for determining the antigenic specificity of CD4+ T cells (e.g., helper T cells).

[0580] In another embodiment, the disclosure provides a method of identifying a T cell reactive to a SARS-CoV-2 T cell epitope. The method comprises contacting a sample of T cells (e.g., a sample of T cells from a COVID-19 patient) with a MHC multimer library, for example, a MHC multimer library disclosed herein, and identifying a T cell within the sample that binds to at least one member of the MHC multimer library to thereby identify a T cell reactive with a SARS-CoV-2 T cell epitope. The MHC multimer library can be an MHC class I multimer library and the T cells are CD8+ T cells. Alternatively or in addition, the MHC multimer library is an MHC class II multimer library and the T cells are CD4+ T cells. The binding can be detected by amplifying a barcode region of the oligonucleotide barcode linked to the MHC multimer, as described herein.

[0581] In another embodiment, the disclosure provides a method of identifying a SARS-CoV-2 T cell epitope. The method comprises contacting a T cell sample with a MHC multimer library, for example, a MHC multimer library disclosed herein, identifying a T cell that binds to at least one member of the MHC multimer library, and determining the sequence of the peptide loaded onto the MHC multimer to which the T cell binds to thereby identify a SARS-CoV-2 T cell epitope. The MHC multimer library can be an MHC class I multimer library and the T cells are CD8+ T cells. Alternatively or in addition, the MHC multimer library is an MHC class II multimer library and the T cells are CD4+ T cells. A non-limiting example of the method of identifying a SARS-CoV-2 T cell epitopes using an MHC multimer-based approach is described in further detail in Example 18. In another embodiment, SARS-CoV-2 T cell epitopes are identified using an MCR system for Membrane Epitope Display, described in further detail below and exemplified in Example 17.

[0582] Throughout the description, where compositions are described as having, including, or comprising specific components, or where processes and methods are described as having, including, or comprising specific steps, it is contemplated that, additionally, there are compositions of the present invention that consist essentially of, or consist of, the recited components, and that there are processes and methods according to the present invention that consist essentially of, or consist of, the recited processing steps.

[0583] In the application, where an element or component is said to be included in and/or selected from a list of recited elements or components, it should be understood that the element or component can be any one of the recited elements or components, or the element or component can be selected from a group consisting of two or more of the recited elements or components.

[0584] Further, it should be understood that elements and/or features of a composition or a method described herein can be combined in a variety of ways without departing from the spirit and scope of the present invention, whether explicit or implicit herein. For example, where reference is made to a particular compound, that compound can be used in various embodiments of compositions of the present invention and/or in methods of the present invention, unless otherwise understood from the context. In other words, within this application, embodiments have been described and depicted in a way that enables a clear and concise application to be written and drawn, but it is intended and will be appreciated that embodiments may be variously combined or separated without parting from the present teachings and invention(s). For example, it will be appreciated that all features described and depicted herein can be applicable to all aspects of the invention(s) described and depicted herein.

[0585] The use of the term “include,” “includes,” “including,” “have,” “has,” “having,” “contain,” “contains,” or “containing,” including grammatical equivalents thereof, should be understood generally as open-ended and non-limiting, for example, not excluding additional unrecited elements or steps, unless otherwise specifically stated or understood from the context. Similarly, the use of any and all examples, or exemplary language herein, for example, “such as” or “including,” is intended merely to illustrate better the present invention and does not pose a limitation on the scope of the invention unless claimed. No language in the specification should be construed as indicating any non-claimed element as essential to the practice of the present invention.

[0586] It should be understood that the expression “at least one of” includes individually each of the recited objects after the expression and the various combinations of two or more of the recited objects unless otherwise understood from the context and use. The expression “and/or” in connection with three or more recited objects should be understood to have the same meaning unless otherwise understood from the context.

[0587] It should be understood that the order of steps or order for performing certain actions is immaterial so long as the present invention remain operable. Moreover, two or more steps or actions may be conducted simultaneously.

### EXAMPLES

[0588] Below are examples of specific embodiments for carrying out the present invention. The examples are offered for illustrative purposes only and are not intended to limit the scope of the present invention.

[0589] The practice of the present invention will employ, unless otherwise indicated, conventional methods of protein chemistry, biochemistry, recombinant DNA techniques and pharmacology, within the skill of the art. Such techniques are explained fully in the literature. See, e.g., T. E. Creighton, Proteins: Structures and Molecular Properties (W.H. Freeman and Company, 1993); A. L. Lehninger, Biochemistry (Worth Publishers, Inc., current addition); Sambrook, et al, Molecular Cloning: A Laboratory Manual (2nd Edition, 1989); Methods In Enzymology (S. Colowick and N. Kaplan eds., Academic Press, Inc.); Remington's Pharmaceutical Sciences, 18th Edition (Easton, Pa.: Mack Publishing Company, 1990); Carey and Sundberg Advanced Organic Chemistry 3rd Ed. (Plenum Press) Vols A and B (1992).

[0590] Unless otherwise stated, all reagents and chemicals were obtained from commercial sources and used without further purification.

### Example 1: Generation of Exchangeable Peptide MHC Class I Multimers with Sortase Tag

[0591] In this example, MHC I heavy chains were expressed and complexed with 02-microglobulin (β2m) and an exchangeable peptide. The MHC heavy chain, having the amino acid sequence of SEQ ID NO: 1, contained a C-terminal sortase tag that enables post-translational coupling to Streptavidin (SAv) to form barcodable exchangeable MHC I tetramers. The SAv, having the amino acid sequence of SEQ ID NO: 3, was also expressed with a C-terminal sortase tag. A sortase enzyme having the amino acid sequence shown in SEQ ID NO: 6 was then used to conjugate a GGG-X click handle peptide to MHC I or a GGG-Y click handle peptide to SAv, where a click handle peptide contains a click moiety such as an alkyne (X) or an azide (Y), or vice versa. Subsequent chemical conjugation of MHC I to SAv by copper-assisted alkyne-azide cycloaddition or copper-free alkyne-azide cycloaddition then resulted in exchangeable-peptide-loaded MHC I tetramers.

[0592] HLA and β2m Expression and Refolding. Bacterial expression plasmids encoding _{HLA-A*02:01} linked to a Sorttag, referred to herein as HLA-A2-Sorttag (containing a C-terminal Sortase tag, 6×-His-tag) (the amino acid sequence of which is shown in SEQ ID NO: 1) and β2m (the amino acid sequence of which is shown in SEQ ID NO: 2) were generated. HLA-A2-Sorttag and β2m were expressed in E. coli in inclusion bodies. Inclusion bodies were purified and solubilized in urea buffer (20 mM MES, pH 6.0, 8 M urea, 10 mM EDTA) containing 1 mM or 0.1 mM DTT for HLA-A2-Sorttag or 0.1 mM DTT for β2m. UV-labile placeholder peptide (GILGFVFJL (SEQ ID NO: 7), where J is 3-amino-3-(2-nitro)phenylpropionic acid) was chemically synthesized. HLA-A2 was refolded with β2m and placeholder peptide according to previously described protocols (Garboczi, et al., PNAS, 89: 3429-3433, 1992; Rodenko, et al., Nat Protoc., 1:1120-32, 2006) with minor modifications. Briefly, the following components were added with stirring to pre-chilled refold buffer (100 mM Tris, pH 8.0, 0.4 M Arginine-HCl, 2 mM EDTA, 5 mM reduced glutathione, 0.5 mM oxidized glutathione, 0.2 mM PMSF) in the following order with final concentration indicated: Peptide (45 uM), β2m (3 uM) and then HLA-A2-Sorttag (1.5 uM) solubilized inclusion bodies. The refold reaction was incubated with stirring overnight at 4° C. On the next day, β2m and HLA-A2-Sorttag solubilized inclusion bodies were added to the refold reaction for 6 μM and 3 μM final concentrations, respectively. On Day 4, the refold reaction was clarified of any precipitation by centrifugation followed by filtration through a 0.2 um filter. The refold reaction was then concentrated using a Minimate Tangential Flow Filtration System (Pall) with a 10 kDa Minimate TFF Capsule (Pall) and Amicon Ultra-15 Centrifugal filters with 10,000 Da molecular weight cutoff membranes (Millipore). The concentrated refold reaction was purified by size exclusion chromatography (SEC) on a HiLoad 26/600 Superdex 200 prep grade (GE Life Sciences) pre-equilibrated in SEC buffer (20 mM HEPES pH 7.2, 150 mM NaCl). Purified fractions corresponding to the monomeric HLA-A2-Sorttag/β2m/peptide complex were pooled and concentrated. A similar procedure was followed for HLA-A2, β2m, and NLVPMVATV (SEQ ID NO: 8) peptide (abbreviated NLV) refolding and purification.

[0593] Conjugation of Click-Handle peptide to HLA-A2-Sorttag using Sortase. HLA-A2 was modified enzymatically with a Click-Handle peptide using the transpeptidase Sortase. Sortase enzyme containing 5 enhancing mutations (Chen, PNAS 2011 108(28) 11399-11404) (the amino acid sequence of which is shown in SEQ ID NO: 6) was expressed in E. coli and purified according to (Antos, Curr Protoc Protein Sci, 2009doi:10.1002/0471140864.ps1503s56). Click-Handle Peptides containing an N-terminal triglycine followed by a PEG linker (PEG₄ or PEG₅) were linked synthetically to: 1) Propargylglycine (referred to as GGG-Alkyne, Alkyne or Alk), 2) Sulfo-DBCO (referred to as GGG-DBCO or DBCO), or 3) Picolyl azide (referred to as GGG-Azide, Azide or Az). GGG-PEG₅-Alkyne peptide with C-terminal amidation was synthesized by GenScript (Piscataway, N.J.). GGG-PEG₄-Azide peptide with C-terminal amidation and GGG-PEG4-DBCO peptide were synthesized by Click Chemistry Tools (Scottsdale, Ariz.).

[0594] HLA-A2/β2m/peptide monomer (100-150 uM), Click Handle Peptide (GGG-Alkyne, GGG-DBCO, or GGG-Azide at 6-10 mM), Sortase (5-6 uM) and 10 mM CaCl2 were mixed and incubated at 4° C. for up to 4 hrs to generate an HLA-Click-Handle fusion. The reaction mixture was purified by SEC as described above to remove residual Sortase and Click-Handle-Peptide. Purified fractions corresponding to the monomeric HLA-Click-Handle/β2m/peptide complex were pooled and concentrated.

[0595] SAv expression, purification and Conjugation of Click-Handle peptide to SAv using Sortase. Full length SAv containing a C-terminal Sortase-tag and 6×HisTag (the amino acid sequence of which is shown in SEQ ID NO: 3) was expressed in BL21(DE3) cells by standard methods. SAv was purified from the soluble fraction by immobilized metal affinity chromatography (IMAC) and SEC as described above. SAv forms a native tetramer and migrates as a stable tetramer on SDS-PAGE (Waner M. J., et al., 2004, doi:10.1529/biophysj.104.047266). Purified fractions corresponding to Tetrameric SAv were pooled and concentrated. SAv-Click-Handle fusions were generated by mixing SAv (70-150 uM), Click Handle Peptide (GGG-DBCO or GGG-Azide at 3-10 mM), Sortase (6 μM) and CaCl2 (10 mM) at 4° C. for up to 4 hrs. The reaction mixture was purified by SEC to remove residual sortase and peptide, and purified fractions corresponding to the SAv-Click-Handle fusion were pooled and concentrated. The extent of conjugation to SAv was assessed by Anti-His Western blot analysis by determining the degree of loss of anti-6×His reactive band intensity relative to varying amounts of the untreated SAv sample (FIG. 3A).

[0596] Generation of clicked Peptide/MHC Class I-SAv multimers. The generation of clicked HLA-Streptavidin fusions is described herein using several different click chemistry formats (e.g., click chemistry that is described in Agard N J, Prescher J A, Bertozzi C R J. Am Chem Soc. 2004 Nov. 24; 126(46):15046-7; and Hong, V., et al., Angew Chem Int Ed Engl. 2009; 48(52): 9879-9883. doi:10.1002/anie.200905087). Because SAv forms an SDS-resistant tetramer, SDS-PAGE can be employed to monitor the extent of reaction and determine the valency of HLA on SAv (Waner M. J., et al., 2004, doi: 10.1529/biophysj.104.047266).

[0597] Formation of the clicked multimer by copper-free alkyne-azide cycloaddition was performed by mixing HLA-A2-DBCO/NLV (150 μM) with SAv-Az (50 μM with respect to SA-monomer) and incubating on ice for 3 hrs. SDS-PAGE analysis confirmed the formation of tetrameric SA with 1, 2, 3, and 4 HLA molecules attached (FIG. 3B). Side-products were observed that were attributed to undesired side-reactions of DBCO with Cysteine residues on β2m or HLA-A2 (van Geel, R, Bioconjugate Chem. 2012, 23(3): 392-398. doi.org/10.1021/bc200365k).

[0598] Covalently conjugated multimeric HLA was also prepared by mixing different ratios of HLA-A2-Az/NLV and SA-DBCO (3:1 and 2:1) at room temperature or on ice for 1.5-3.0 hr. SDS-PAGE analysis shows the formation of tetramer, trimer, dimer and monomer HLA-A2-Az-SAv-DBCO species, with a reduced level of undesirable side-reaction products compared to HLA-A2-DBCO-SAv-Az. (FIG. 3C).

[0599] An additional method to generate covalently linked HLA-A2 and SAv was through copper-assisted alkyne-azide cycloaddition. HLA-A2-Alk-SAv-Az was generated by mixing the following reaction components on ice: HLA-A2-Alk/GILGFVFM (SEQ ID NO: 7)/β2m (100-130 μM), SAv-Az (70-80 μM with respect to SA-monomer), Copper Sulfate (0.5 mM), BTTAA (2.5 mM) and Ascorbic Acid (5 mM). The reaction was monitored by SDS-PAGE and after 4 hrs the reaction mixture was purified by SEC to separate unreacted HLA, SAv, and other reaction components from purified HLA-A2-Alkyne-SAv-Az multimer. SEC fractions were analyzed by SDS-PAGE and fractions corresponding to majority tetramer/trimer species were pooled and concentrated. The peptide/HLA-A2-Alkyne-SAv-Az/□2m sample was analyzed by SDS-PAGE, which showed apparent tetramer and trimer species and very small amount of monomer for the non-boiled/non-reduced samples, while boiled and reduced gel analysis confirms the covalent linkage of HLA-A2-Alk and SAv-Az monomer at approximately 53 kDa (FIG. 3D). Mass spectrometry under denaturing conditions also confirmed the formation of an azide-alkyne fusion between HLA-A2 and SAv (not shown). HLA-Alkyne-SAv-Az formats were also generated for HLA-A01:01, HLA-A*03:01 and HLA-A*24:02, as shown in FIG. 3E.

### Example 2: Generation of Exchangeable Peptide MHC Class I Multimers with Intein Tag

[0600] In this example, MHCI heavy chain was expressed with a C-terminal N-intein tag, and streptavidin (SA) was expressed with an N-terminal C-intein tag, followed by intein-mediated conjugation to create the exchangeable-peptide-loaded MHC I tetramers. Sequences for inteins and use thereof to conjugate proteins are described further in, for example, Stevens, et al. (2016) J. Am. Chem. Soc., 138, 2162-2165, 2016; Shah et al. (2012) J. Am. Chem. Soc., 134, 11338-11341, 2012; and Vila-Perello et al. (2013) J. Am. Chem. Soc., 135, 286-292. HLA-A2 (HLA-A*02:01) was expressed in BL21(DE3) as a fusion to the Npu N-intein fragment at the C-terminus (the amino acid sequence of which is shown in SEQ ID NO: 4). Streptavidin was expressed in BL21(DE3) with an N-terminal fusion to the Npu-C-intein fragment and a C-terminal Flag tag (the amino acid sequence of which is shown in SEQ ID NO: 5). HLA-A2-N-intein and C-intein-SAv expressed in bacterial inclusion bodies. Inclusion bodies were isolated and solubilized in Urea buffer (25 mM MES, 8 M urea, 10 mM EDTA, 0.1 mM DTT, pH 6.0). HLA-A2-N-intein was refolded with β2m and UV-labile placeholder peptide (GILGFVFJL (SEQ ID NO: 7), where J is 3-amino-3-(2-nitro)phenylpropionic acid). The following components were added with stirring to pre-chilled refold buffer as described in Example 1. The refold reaction was concentrated using an Amicon Stir Cell with 10000 Da MWCO, Millipore Biomax Ultrafiltration Discs (Millipore) and Amicon Ultra-15 Centrifugal Filter Units 10,000 MWCO (Millipore). The concentrated refold reaction was purified by size exclusion chromatography (SEC) on a HiLoad 26/600 Superdex 200 prep grade (GE Life Sciences) pre-equilibrated in SEC buffer (20 mM HEPES pH 7.2, 150 mM NaCl). Purified fractions corresponding to the monomeric HLA-A2-N-intein/β2m/peptide complex were pooled and concentrated to 100-200 uM. C-intein-SAv was refolded by the same approach: briefly, urea-solubilized C-intein-SAv was injected into prechilled refold buffer and refolded according to the protocol described in Example 1, concentrated in Amicon stir cell with a 10K MWCO membrane as described and purified by size exclusion chromatography as described above. SEC purified C-intein-SAv was concentrated to 100-200 μM.

[0601] Splicing reactions between HLA-A2-N-intein/β2m/peptide complex and C-intein-SAv were carried out by adding Tris(2-carboxyethyl)phosphine hydrochloride (TCEP) to a final concentration of 0.5 mM to both the HLA-A2-int and the C-int-SA components. All components were kept on ice. To favor formation of tetrameric species, streptavidin was added in 5 increments over a 16 hrs period until an equimolar amount to HLA-A2-intein was achieved. SDS-PAGE analysis of the reaction under non-reducing/non-boiled conditions shows the formation of higher MW species, while the boiled/reduced samples showed a species at approximately 52 kDa, consistent with the expected size for an HLA-A2-SAv fusion (FIG. 4).

### Example 3: Production of Exchangeable MHCI Tetramers via Biotinylation and Coupling to Streptavidin

[0602] HLA-A*02 heavy chain with a C-terminal Avitag was expressed in E. coli in inclusion bodies. The amino acid sequence of the Avitag is shown in SEQ ID NO: 161. Purified inclusion bodies were solubilized in urea and refolded with β-2-microglobulin and the peptide NLVPMVATV (SEQ ID NO:8) or the conditional ligand GILGFVFJL (SEQ ID NO:7), where J is a 2-nitrophenylamino acid residue, according to literature methods (Rodenko et. al., (2006) Nat. Protoc. 1(3):1120-32). SEC-purified MHC monomers comprising the heavy chain, β-2-microglobulin and peptide were then biotinylated using biotin ligase and then SEC-purified once again. Streptavidin was added to biotinylated MHC monomers in 10 separate aliquots to achieve a slight molar excess of biotin sites over MHC monomers. Peptide exchanges (as described in Example 4) are executed on either the biotin-mediated streptavidin tetramer or on the biotinylated HLA monomer. In the case of the latter, monomers are tetramerized with streptavidin after exchange.

### Example 4: Peptide Exchange Via Dipeptide or UV Exchange

[0603] HLA-A*02:01-Alk-SAv-Az Conjugated Tetramers produced as described above in Example 1, as well as biotin-mediated HLA-A*02 tetramers produced as in Example 3, were exchanged by either of two methods. For dipeptide exchange, 5 μM MHC tetramers loaded with a place-holder peptide (e.g., GILGFVFJL (SEQ ID NO:7)) were incubated with a 30-fold excess of NLVPMVATV (SEQ ID NO:8) peptide in the presence or absence of 10 mM GM dipeptide for 3 hours at room temperature (Saini et al. (2006) PNAS 112(1):202-206). For UV-exchange, 2-10 μM MHC monomers or 0.5-2.5 μM MHC tetramers loaded with a place-holder peptide (GILGFVFJL (SEQ ID NO:7)) were incubated with a 30-100-fold molar excess of NLVPMVATV (SEQ ID NO:8) (or other peptide) for 1 hour on ice, followed by 30 minutes exposure to 365 nm UV light from a lamp held 2-5 cm from the sample. The UV exposure was sometimes followed by 30 minutes incubation at 30° C. to allow complete exchange. Efficiency of peptide exchange was monitored by Differential Scanning Fluorimetry (DSF), ELISA and cell staining/flow cytometry.

[0604] For DSF, 0.25 mg/ml HLA-A*02 tetramers were mixed with an equal volume of 20× Sypro Orange (Invitrogen S6650), and subjected to a 0.05° C./s ramp from 25° C. to 99° C. in a qPCR instrument (e.g., Applied Biosystems Quant Studio 3). A peak in the first derivative of the melt curve indicates the Tm of the pMHC. As seen in FIG. 5A, the Tm of HLA-A*02:01-Alk-SAv-Az Conjugated Tetramers produced as in Example 1, shifts from 40° C. to 61° C. upon UV-exchange from the placeholder GILGFVFJL (SEQ ID NO:7) peptide to NLVPMVATV (SEQ ID NO:8). The Tm after UV exchange is identical to that observed for NLVPMVATV (SEQ ID NO:8) exchanged into biotinylated monomers followed by tetramerization (industry standard) or exchanged directly into biotin-mediated tetramers (FIG. 5B). These data confirm that multimeric state has no impact on the efficiency of UV-exchange, and that such Conjugated Tetramers described herein have the same stability as the industry standard pMHC.

[0605] For flow cytometry, 10⁵ donor T cells that had been expanded with NLVPMVATV (SEQ ID NO:8) (or other peptide) were stained with pMHC tetramers produced as above. All pMHC were diluted in PBS plus 10% FBS, and stained with anti-CD8-BV785, and anti-Flag-APC or anti-streptavidin-PE (Biolegend) was used as secondary. As seen in FIG. 6A-F, either dipeptide exchange or UV exchange executed on the biotin-mediated tetrameric form produces HLA-A*02 tetramers that display the same level of binding to expanded T cells as those produced by industry-standard methods (tetramerization post refolding or post UV exchange of biotinylated monomers). FIG. 7 illustrates the high affinity binding of HLA-A*02:01-Alk-SAv-Az Conjugated Tetramers that were UV-exchanged to the NLVPMVATV (SEQ ID NO:8) peptide to expanded T cells.

[0606] ELISA were also used to monitor exchange on tetramers and is another indicator of pMHC stability. Plates were first coated with anti-streptavidin antibody, followed by capture of tetramers in Citrate-phosphate buffer at pH 5.4, and then read out using HRP-conjugated anti-β2-microglobulin (Biolegend). As seen in FIG. 8A, a panel of NLVPMVATV (SEQ ID NO:8) mutant peptides can be effectively UV-exchanged into HLA-A*02:01-Alk-SAv-Az Conjugated Tetramers, generating a span of ELISA signals. A smaller panel of similar peptides UV-exchanged into biotin-mediated HLA-A*02 tetramers also generated a range of ELISA signals (FIG. 8C), which positively correlated with Tm measured by DSF (FIG. 8B).

### Example 5: Conjugated Tetramers Produced with HLA-A*01:01

[0607] HLA-A*01:01 monomers refolded with the peptide STAPGJLEY (SEQ ID NO: 16) were used for construction of HLA-A*01:01-Alk-SAv-Az Conjugated Tetramers and characterized as described in Example 1. As seen in FIG. 9A and FIG. 9B, HLA-A*01:01-Alk-SAv-Az Conjugated Tetramers were highly multimeric with a low percentage of aggregates (3%). UV treatment in the presence of a cognate peptide VTEHDTLLY (SEQ ID NO: 10) resulted in a characteristic shift in the DSF melt curve, indicating effective peptide exchange (FIG. 9C). The exchanged HLA-A*01:01-Alk-SAv-Az conjugated tetramers bound strongly to PBMCs expanded with the VTEHDTLLY peptide (SEQ ID NO: 10), similar to HLA-A*01:01 refolded with VTEHDTLLY peptide (SEQ ID NO: 10) that was conjugated to streptavidin via biotin (FIG. 9D). As expected, no binding was observed in the absence of UV exchange.

### Example 6: Conjugated Tetramers Produced with HLA-A*24:02

[0608] HLA-A*24:02 monomers refolded with the peptide VYGJVRACL (SEQ ID NO: 11) were used for construction of HLA-A*24:02-Alk-SAv-Az Conjugated Tetramers and characterized as described in Example 1. As seen in FIG. 10A and FIG. 10B, HLA-A*24:02-Alk-SAv-Az Conjugated Tetramers were highly multimeric with a low percentage of aggregates (6%). UV treatment in the presence of a cognate peptide QYDPVAALF (SEQ ID NO: 12) resulted in a characteristic shift in the DSF melt curve, indicating effective peptide exchange (FIG. 10C). The exchanged HLA-A*24:02-Alk-SAv-Az conjugated tetramers bound strongly to PBMCs expanded with the QYDPVAALF peptide (SEQ ID NO: 12), similar to HLA-A*24:02 refolded with QYDPVAALF peptide (SEQ ID NO: 12 that was conjugated to streptavidin via biotin (FIG. 10D). As expected, no binding was observed in the absence of UV exchange.

### Example 7: Conjugated Tetramers Produced with HLA-B*07:02

[0609] HLA-B*07:02 monomers refolded with the peptide AARGJTLAM (SEQ ID NO: 14) were used for construction of HLA-B*07:02-Alk-SAv-Az Conjugated Tetramers and QC′d as described in Example 1 above. As seen in FIG. 11A and FIG. 11B, HLA-B*07:02-Alk-SAv-Az Conjugated Tetramers were multimeric with no detectable aggregates. After UV treatment in the presence of a cognate peptide RPHERNGFTVL (SEQ ID NO: 13), exchanged HLA-B*07:02-Alk-SAv-Az conjugated tetramers bound strongly to PBMCs expanded with the RPHERNGFTVL peptide (SEQ ID NO: 13), similar to HLA-B*07:02 refolded with RPHERNGFTVL peptide (SEQ ID NO: 13) that was conjugated to streptavidin via biotin (FIG. 11C). As expected, no binding was observed in the absence of UV exchange.

### Example 8: Barcoding and Pooling of UV-Exchanged Tetramers

[0610] Exchanged HLA-A*02:01-Alk-SAv-Az Conjugated Tetramers were easily labeled with an identifying oligonucleotide tag (barcode) due to the fact that the biotin binding sites on streptavidin were empty. 5′ biotinylated oligonucleotides were added at a 2:1 oligo:tetramer molar ratio, and incubated for 30 mins at 4° C., followed by quench with biotin at 400:1 biotin:tetramer molar ratio for 30 min at 4° C. Barcoding was confirmed by electrophoresis on a 4-12% bis-Tris gel, followed by blotting to nitrocellulose and staining with anti-Flag antibody (Invitrogen #MA1-91878-D800). As seen in FIG. 12, a gel shift relative to the tetramer starting material indicates proper labeling with the oligonucleotide barcode.

### Example 9: Single Cell Sequencing with Pooled Barcoded UV-Exchanged Tetramers

[0611] After confirmation of oligonucleotide labeling, individual HLA-A*02:01-Alk-SAv-Az Conjugated Tetramer samples that were UV-exchanged for 192 different APL variants of NLVPMVATV (SEQ ID NO:8) were pooled, stained on NLVPMVATV (SEQ ID NO: 8)-expanded T cells, and subjected to single cell sequencing. The analyzed results are shown in a heatmap in FIG. 13, indicating clonotype-specific binding of a subset of APL variants.

### Example 10: Production of a Porous Hydrogels for High Throughput Production of Barcoded UV-Exchanged Tetramer Pools

[0612] Hydrogel beads were produced by mixing acrylamide monomer units and bis-acrylamide crosslinker units at a variety of relative concentrations along with a mixture of acrylated oligonucleotide primers, encapsulating in droplets using a microfluidic drop-maker, and incubating the mixture until crosslinking was complete. In this Example, the pre-crosslinked aqueous mix included 0.75% bis-acrylamide, 3% acrylamide, 25 μM 5′-acrylated forward primer, 0.5% ammonium persulfate, in 10% TEBST (Tris-EDTA-buffered saline plus Tween-20). All reagents of the aqueous mixture were combined and stirred. The mixture was supplemented with 1.5% TEMED and 1% of 008-FluoroSurfactant, encapsulated in droplets, incubated at room temperature for 1 hour, and then transferred into an oven at 60° C. for overnight incubation, thus forming the hydrogels. The hydrogel beads were washed once with 20% 1H,1H,2H,2H-perfluoro-1-octanol (PFO), then washed three times with TEBST, and then washed three times with low TE (1 mM Tris-Cl pH 7.5, 0.1 mM EDTA). Hydrogel beads were stored in TEBST at 4° C. until use.

### Example 11: Single Template PCR to Generate Peptide-Encoding Amplicons

[0613] Linear DNA templates encoding a SUMO domain-peptide fusion were PCR-amplified onto hydrogel beads in drops under single template conditions, where each drop gets at most a single DNA template. 1.4 mL hydrogel beads produced in Example 10 were mixed together with PCR components as follows in a 2 mL reaction volume: 400 μL Q5 reaction buffer (New England Biolabs), 40 μL 10 mM dNTP, 40 μL 1 uM μforward primer, 40 μL 25 μM 5′-biotinylated reverse primer, 40 μL 0.1 pg/μL linear DNA template (or mix of templates), 8 μL 20% IGEPAL, and 20 μL Q5 DNA polymerase (New England Biolabs). The mixture was encapsulated in drops and subjected to 35 cycles of PCR. After drop lysis by addition of an equal volume of 100% perfluorooctanol (PFO), hydrogels were washed with 10 volumes of low TE five times. Aliquots (10 μL) of hydrogel beads were digested with Xbal, which cuts within the amplicon, for 1 hour at 37° C. and run on a 1.2% agarose gel along with PCR supernatant to quantify yield and quality of amplicons (FIG. 14). That single template conditions were in effect was demonstrated by labeling hydrogels with streptavidin-PE, where only 23% of drop-amplified hydrogels were stained, compared to 100% of bulk-amplified hydrogels (FIG. 15).

### Example 12: Loading of Barcodable Exchange-Ready Conjugated Tetramers onto Hydrogels

[0614] PCR-amplified hydrogels were mixed 1:1 by volume with 50 to 500 nM HLA-A*02:01-Alk-SAv-Az Conjugated Tetramers loaded with the UV-labile peptide (e.g., GILGFVFJL (SEQ ID NO:7), protected from ambient light, and incubated on ice for 2 hours. Loading of HLA-A*02:01-Alk-SAv-Az Conjugated Tetramers was confirmed by washing and staining with anti-Flag-APC or anti-β2M-Alexa488 as seen in FIG. 16A. The quantity of tetramers loaded was quantified by releasing with benzonase or SmaI, which cuts within the amplicon, followed by ELISA with anti-streptavidin capture and either anti-Flag-HRP or anti-β2M-HRP detection, as shown in FIG. 16B.

### Example 13: In-Drop In Vitro Transcription/Translation (IVTT) of Peptide and UV Exchange into Loaded Tetramers

[0615] 120 μL of hydrogel beads are co-encapsulated in drops with 240 μL of IVTT master mix, including 120 μL PURExpress solution A (New England Biolabs), 90 μL PURExpress solution B (NEB), 6 μL RNAse OUT (Invitrogen), and 1.2U Ulp1 protease (Invitrogen). Drops were incubated at 30° C. for 4 hours, without shaking, then UV-exchanged by 30-minute exposure to 365 nm UV light. The UV exposure was followed by 30 minutes incubation at 30° C. to allow complete exchange. D-Biotin was added to the IVTT reactions to a final concentration of 500 μM prior to breaking drops, which was then accomplished by addition of an equal volume of 100% PFO. Hydrogel beads were washed five times with 10 volumes of PBS plus 2% BSA. Sufficient peptide can be produced from a PCR amplicon to generate functional exchanged tetramers, as shown in FIGS. 17A and 17B.

### Example 14: Release and Analysis Of Single Chain Multimeric Peptide-MHC

[0616] UV-exchanged pMHC were released from washed hydrogels by digestion with SmaI, which cuts within the amplicon upstream of the peptide-encoding region, such that the tetramers were released with a self-identifying oligonucleotide tag (barcode) as indicated in FIG. 16B and summarized in FIG. 18.

### Example 15: Generation of Conjugated Peptide/MHC Class II-SAv Multimers

[0617] Conjugation of Click-Handle peptide to MHC II-Sorttag using Sortase. The sequences of MHC II α- and β-chains were recombinantly expressed as follows: the α-chain extracellular domain sequence was expressed with a C-terminal sortase tag that enables post-translational coupling to Streptavidin (SAv) to form barcodable exchangeable MHC II multimers The α-chain also contained a Myc tag for diagnostic purposes. The amino acid sequence of the α-chain extracellular domain with sortag and Myc tag is shown in SEQ ID NO: 191. The β-chain was recombinantly expressed with an N-terminal low-affinity placeholder peptide (CLIP peptide, the sequence of which is shown in SEQ ID NO:189) followed by a flexible linker, the β-chain extracellular domain and a Histidine purification tag. The amino acid sequence of the β-chain extracellular domain with placeholder peptide, flexible linker and His Tag is shown in SEQ ID NO:192. The flexible linker contained a cleavage site that permitted breaking the connection between the peptide and the 0-chain by a specific protease, thus facilitating subsequent peptide exchange. MHCII molecules with a covalent placeholder peptide loaded therein are referred to herein as p*MHCII.

[0618] p*MHCII α- and β-chains were co-expressed in CHO cells and secreted into the expression medium as a stable heterodimer. Following CHO expression, p*MHCII was purified by immobilized metal ion affinity chromatography and size exclusion chromatography (SEC). Sortase enzyme was then used to conjugate a GGG-X peptide to the p*MHCII α-chain (FIG. 19, step 1) where X can be an azide, an alkyne, or any clickable chemical moiety. To execute the chemical conjugation reaction p*MHCII (30-50 μM), Click Handle Peptide (GGG-Alkyne, GGG-DBCO, or GGG-Azide at 6-10 mM), Sortase (5-6 μM) and 10 mM CaCl₂) were mixed and incubated at 4° C. for up to 2 hours to generate an p*MHCII-Click-Handle fusion. The reaction mixture was purified by SEC to remove residual Sortase and Click-Handle-Peptide. Purified fractions corresponding to p*MHCII-Click-Handle fusion were pooled and concentrated. Click Handle addition caused a shift in the size of the conjugated protein, validating a successful sortase-mediated ligation (FIG. 20A).

[0619] The generation of conjugated p*MHCII-SAv multimers. The expression, purification and conjugation of Click-Handle p*MHCII to SAv using Sortase is illustrated in FIG. 19, step 2, and was carried out essentially as described in Example 1 for MHCI multimers. Copper-assisted alkyne-azide cycloaddition was used to generate covalently linked p*MHCII and SAv (FIG. 19, step 3). p*MHCII-Alk-SAv-Az was generated by mixing the following reaction components on ice: MHC II-Alk (50 uM), SAv-Az (25 uM with respect to SA-monomer), Copper Sulfate (0.5 mM), BTTAA (2.5 mM) and Ascorbic Acid (5 mM). The reaction was monitored by SDS-PAGE (FIG. 20B) and after 4 hours the reaction mixture was purified by SEC to separate unreacted HLA, SAv, and other reaction components from purified p*MHCII-Alk-SAv-Az multimer (FIG. 20C). The SAv and the β-chain contained FLAG and His tags, respectively, enabling to distinguish fractions corresponding to multimer species (FIGS. 20D and 20E). The multimer fractions showed apparent tetramer and trimer species. More importantly, free SAv species were not observed in boiled samples taken from multimer fractions under SDS-PAGE and western blot analysis (FIG. 20D). This indicates that the dominant species is a tetramer, in which each SAv subunit is covalently linked to an p*MHCII subunit.

### Example 16: pMHC II Multimers Are Exchangeable and Bind Cognate Epitope-Specific TCR

[0620] Linker digestion and peptide exchange. p*MHCII-Alk-SAv-Az multimer (henceforth—p*MHCII-SAv) was digested by Factor Xa (NEB) at a ratio of 5:1 (w/w) over night at 4° C. in the presence of 1 mM CaCl₂) (FIG. 19, step 4). Then the protease was irreversibly inactivated by the addition of 1,5-Dansyl-Glu-Gly-Arg Chloromethyl Ketone inhibitor according to the manufacturer's recommendations (Sigma-Aldrich). Digested samples migrated faster than non-digested samples indicating the removal of the freshly cleaved peptide under SDS-PAGE denaturing conditions (FIG. 21A).

[0621] To test whether cleaved p*MHCII-SAv (henceforth—p↓MHCII-SAv) bound an exchanged peptide, an ELISA binding assay was performed. In this assay, a biotinylated peptide epitope from Influenza A virus (Hemagglutinin, HA, the amino acid sequence of which is shown in SEQ ID NO:193) was loaded while the cleaved placeholder peptide was removed under mild acidic pH conditions (FIG. 19, step 5). The level of exchange was then determined by monitoring the binding of streptavidin-HRP to the newly swapped biotinylated peptide. Free biotin binding sites on the streptavidin molecules were blocked with an excess of free biotin prior to the exchange reaction. This step ensured that any detected biotinylated peptide can only be bound to the peptide-binding pocket. The exchange-buffer composition was as follows: 100 mM sodium citrate pH 5.5, 50 mM sodium Chloride, 1% octyl glucoside (v/v), lx of SIGMAFAST protease inhibitor cocktail (Sigma-Aldrich) and 0.1 mM DTT. 150 μL of peptide exchange reactions were prepared in a 96-well plate where each well consists of: 1× exchange buffer, 30 nM p↓MHCII-SAv and 5-fold serial dilutions of either HA-biotinylated peptide, HA-non-biotinylated peptide or buffer. Incubation of 6 nM of p↓MHCII monomer with 5-fold serial dilutions of HA-biotinylated peptide was included as a positive control. The exchange reaction was stopped after an over-night incubation at 37° C. by neutralizing the acidic pH with the addition of 1:15 (v/v) of 1 M Tris-HCl, pH 10. Using a 96 channel benchtop pipettor, 100 μL from each well were transferred to an ELISA plate that was pre-coated with (100 ng/well) L243 conformational sensitive antibody (Abcam), washed (3×PBS-T) and blocked with PBS-T supplemented with 2% (v/v) BSA. Following 1 hr incubation at RT, the plate was washed (3×PBS-T), incubated with SA-HRP for 30 mins in the dark, washed again (3×PBS-T) and developed using an HRP substrate and stop solution. A positive correlation between peptide concentrations and the levels of SA-HRP binding was observed for both monomeric p↓MHCII and p↓MHCII-SAv (FIG. 21B). This indicates that both species exchanged the placeholder peptide for biotinylated-HA peptide. Incubation with either non-biotinylated peptide or buffer did not yield a detectable signal implying that binding of the biotinylated epitope was specific. In contrast to monomeric p↓MHCII, the curve for p↓MHCII-SAv was shifted to the right and did not reach saturation at higher peptide concentrations. The multimer is at least 4-fold bigger in size, which might occlude binding to the capturing antibody and/or to the SA-HRP readout probe.

[0622] Binding of exchanged p↓MHCII-SAv to soluble TCR. F11, an HA-peptide epitope specific soluble TCR, was fused to an FC domain and produced as described in Wagner et al. (2019) J Biol Chem., 294:5790-5804 (FIG. 19, step 6). Briefly, DNA encoding the F11 extracellular alpha- and beta-chains was cloned into pDT5 plasmids downstream of a mouse IgGk chain leader sequence. The human TCR constant domains contained an additional inter-chain disulfide bond. The C-alpha domain was followed by the upper hinge sequence of human IgG1 (VEPKSC; SEQ ID NO: 270), the core and lower hinge, and then the Fc domain. The native IgG1 light-chain cysteine was inserted at the C-terminus of C-beta to pair with the upper hinge cysteine and further stabilize the TCR heterodimerization. Additional modifications included the removal of N-linked glycosylation sites. Plasmids encoding alpha-Fc and beta domains were expressed in Expi-CHO cells by transient transfection, and the product was purified from clarified supernatants by protein A affinity chromatography.

[0623] The exchange reaction was performed as described above in Example 1 with two differences: a single tube was used instead of a 96-well plate and the protein concentrations varied. 1.75 μM of p↓MHCII-SAv were incubated with 100 μM of HA peptide in the presence of exchange buffer. After the reaction was stopped and kept on ice, a Bio-layer interferometry (BLI) assay was carried out using an Octet RED96 instrument (ForteBio) at 30 C in BLI buffer (PBS+0.02% Tween20, 0.1% BSA, 0.05% sodium azide). F11 TCR was loaded onto Anti-hIgG Fc Capture Biosensors (Molecular Devices) to 0.6 nm loading signal. After washing with BLI buffer, biosensors were transferred to wells containing either 14 nM of exchanged p↓MHCII-SAv, 125 nM of non-exchanged p*MHCII-SAv or BLI buffer to measure association kinetics (FIG. 21C). To measure dissociation kinetics, biosensors were transferred back to BLI buffer devoid of multimers. A significant increase in BLI-response signal was observed for HA-exchanged p↓MHCII-SAv suggesting a strong association with F11 TCR (FIG. 21C). In contrast, non-exchanged p*MHCII-SAv showed very little association indicating that the interaction between F11-TCR and an HA displaying multimer is specific. No association was observed when the biosensors were dipped into BLI buffer. HA-exchanged NMHCII-SAv exhibited very slight dissociation from F11-TCR. This result indicates a tight TCR-MHC II binding which is characteristic of high-avidity multimer interaction.

### Example 17: SARS-CoV-2 T Cell Epitope Identification by Membrane Epitope Display

[0624] In this example, the MCR™ system was used to identify SARS-CoV-2 T cell epitopes using T cells from SARS-CoV-2 patients. In brief, the MCR™ system uses chimeric MHC/TcR receptors (MCR) expressed on mammalian cells to display epitopes to T cells, wherein epitope binding triggers expression of a reporter gene in the cell expressing the chimeric MHC/TcR receptor. Cells are sorted based on fluorescence into multiple gates and higher scores are assigned to cells that preferentially get sorted into higher-fluorescence gates. This technology is described further in Kisielow et al. (2019) Nat. Immunol. 20:652-662. Additionally, FIG. 27 shows a schematic diagram of the chimeric MHC/TcR receptor used in the MCR™ system and FIG. 28 shows a schematic diagram of the steps of the MCR™ system for identifying T cell epitopes.

[0625] Four different HLA Class II molecules were examined: DRB 1*07:01, 1*04:04, 1*15:01, 1*10:01. Peptides from several different SARS-CoV-2 antigenic peptides were examined, including the Spike Protein (S), the Nucleocapsid Protein (NP) and ORF3a. Peptides were specifically presented by one HLA allele, but peptides may also be presented by more than one allele, e.g., all four HLA alleles in this experiment.

[0626] Representative results for the S protein are shown in FIG. 22A-22B, with FIG. 22A showing five different T cell epitopes (the sequences of which are shown in SEQ ID NOs: 271-275) and FIG. 22B showing three different T cell epitopes (the sequences of which are shown in SEQ ID NOs: 276-278). Representative results for the NP protein are shown in FIG. 23, which shows seven different T cell epitopes (the sequences of which are shown in SEQ ID NOs: 276-278). T cell epitopes were also identified in the ORF3a peptides.

[0627] Overall, the results indicated that use of the MCR™ system was an effective approach for identifying T cell epitopes from a variety of SARS-CoV-2 antigens.

### Example 18: SARS-CoV-2 T Cell Epitope Identification Using Peptide-MHC Tetramers

[0628] In this Example, MHC tetramers loaded with SARS-CoV-2 antigenic peptides were used to identify T cell epitopes using T cells from SARS-CoV-2 patients. MHC tetramers such as those described herein can be used. Additionally or alternatively, other MHC tetramer approaches described in the art can be used, such as described in Altman et al. (1996) Science 274:94-96, Bakker et al. (2005) Curr. Opin. Immunol. 17:428-433, 2005), Goldberg et al., J Cell. Mol. Med. (2011) 15:1822-1832, Leisner et al. (2008) PLoS One 3(2):e1678, Zhang et al., Nature Biotech. (2018); doi:10.1038.nbt.4282, Nepom et al. (2002) Arthrit. Rheumat. 46:5-12; Vollers and Stern (2008) Immunol. 123:305-313; Cecconi et al. (2008) Cytometry 73A:1010-1018, Day et al., (2003) J Clin Invest. 112(6):831-842, Novak et al. (1999) J. Clin. Invest. 104:63-67; and Macaubus et al. (2006) J. Immunol. 176:5069-5077.

[0629] A 596 member SARS-CoV-2 peptide library for display on HLA-A*02:01 tetramers was prepared. The library comprised 9mers of the SARS-CoV-2 full proteome with IC₅₀ less than 500 nM, as well as close match sequences between SARS-CoV and SARS-CoV-2, published predicted peptides that were above IC₅₀ less than 500 nM for HLA-A*02:01, epitopes from common cold coronaviruses with evidence of positive T cell assays, immunodominant epitopes to SARS-CoV (IEDB), peptides with predicted glycosylation sites, peptides containing identified mutations in the spike protein, platform control epitopes against which control cells have been expanded, and CEF (CMV, EBV, influenza) epitope controls.

[0630] Separate peptide libraries were designed for five additional MHC Class I molecules: HLA-A*11:01, HLA-A*03:01, HLA-A*01:01, HLA-A*24:02 and HLA-B*07:02. The percentage of peptides in the library that bound to each MHC Class I molecule, grouped by types of antigens, is shown in FIG. 24A. The results showed designed library sizes between 163 and 506 peptide epitopes and all alleles had a similar representation of SARS-CoV-2 proteins. The ORF lab antigen was the most represented, occupying 40-70% of the library. Overall, 62% of all peptides identified across HLAs were from ORF lab, while only 11% were from the spike protein, even though the spike protein is the most abundant in the virus itself.

[0631] The overlap of peptides in the designed libraries by A1101, A0101 and A0301 is shown in FIG. 24B. The overlap of peptides in the designed libraries by A0201, A0101 and A0301 is shown in FIG. 24C. These overlap analyses showed that there is a significant overlap between the peptides predicted to bind A1101 and A0301. Besides those two alleles, the number of shared peptides between libraries is less than 10% of the total.

[0632] To analyze T cell binding to the 596 member peptide-HLA-A*02:01 tetramer library, peripheral blood mononuclear cells (PBMCs) from SARS-CoV-2 patients was obtained and CD8+ T cells were enriched by standard methods. The CD8+ T cells were stained with the tetramer library at 1 nM per tetramer. Cells were washed, stained with anti-FLAG-PE (tetramers each contained a FLAG peptide), washed again, stained with TCR-ADT, washed a final time and then all tetramer+ cells were sorted on a standard cell sorter.

[0633] Representative results for A*02:01 samples are shown in FIG. 25, which shows the top 20 different peptide epitopes from the indicated SARS-CoV-2 antigens, along with the number of samples, number of clones and number of cells reactive with each peptide. The sequences of the peptide epitopes shown in FIG. 25 are shown in SEQ ID NOs: 286-305. Additional peptide epitope sequence that showed T cell reactivity are shown in FIG. 29.

[0634] The results showed that T cell reactivity was observed across the entire SARS-CoV-2 proteome. The top three epitope hits showed up across at least three different samples. Multiple epitope hits showed diverse clonality. The highest T cell reactivity observed was 9 cells/2000 cells. Thus, there is an estimated T cell reactivity of up to about 0.05% per epitope when taking into account enrichment by sorting. The antigen reactivity prevalence, from highest to lowest, was ORF lab, Spike, 3A and N (equal), M. This antigen reactivity trend was similar across samples, clones and cells.

[0635] For further analysis, reactive epitopes were mapped across related viruses, including SARS-Co-V, COV-229E, COV-NL63, COV-OC43 and COV-HKU1. The results are summarized in FIG. 26, with the four most prevalent epitope hits from the library screen (the epitopes shown in SEQ ID NOS: 286-289) highlighted. The results indicated that most of the reactive epitopes are similar or identical in SARS-CoV but are not conserved across endemic coronaviruses. The top epitope from the library screen (SEQ ID NO: 286) shows less similarity to SARS-CoV, and thus was largely unique to SARS-CoV-2.

[0636] Overall, the results indicated that screening of the SARS-CoV-2 peptide-MHC tetramer library was an effective approach for identifying T cell epitopes from a variety of SARS-CoV-2 antigens.

### Example 19: SARS-CoV-2 T Cell Epitope Identification by Membrane Epitope Display

[0637] In this example, the MCR™ system schematically illustrated in FIG. 27 and FIG. 28 and described further in Example 17 was used to identify SARS-CoV-2 T cell epitopes. Published T cell receptor sequences were used from T cells obtained from the bronchoalveolar lavage fluid (BAL) of acute COVID-19 patients with mild or severe symptoms. FIG. 30 illustrates the T cell clonotypes from a representative patient and the HLA Class I (A*30:01, A*02:07, B*13:02, B*46:01, C*01:02, and C*06:02) and Class II alleles (DPA1*02:01 DPB1*02:01, DPA1*01:03 DPB1*02:01, DPA1*02:01 DPB1*14:01, DPA1*01:03 DPB1*14:01, DQA1*03:01 DQB1*03:01, DQA1*05:05 DQB1*03:01, DQA1*05:05 DQB1*03:02, DQA1*03:01 DQB1*03:02, DRA*01:01 DRB1*04:03, DRA*01:01 DRB1*11:01, DRA*01:01 DRB3*02:02, DRA*01:01 DRBS*01:01, and DRA*01:01 DRBS*02:02) tested in the reporter assay, based on patient-specific HLA selection. The T cell epitope libraries screened were designed to cover the SARS-CoV-2 genome in its entirety in one amino acid shifts, having 23mers for HLA-II screening and 9mers for HLA-I screening.

[0638] Representative results are shown in FIG. 31A-D.

[0639] As shown in FIG. 31A, a representative patient (C141) having mild COVID-19 symptoms exhibited numerous CD8 and CD4 T cell clonotypes. A representative CD4 T cell clonotype was selected for further analysis of the epitope specificity of its T cell receptor (TCR). This TCR (TCR115) was screened in the MCR™ system using a 23mer HLA-II library, with FIG. 31B showing the results of Round 4 of co-culture—single cell sort of activated reporter cells. As shown in FIG. 31C, analysis of the sequences of the 23mer peptides bound by the highest responders uncovered a common 20mer epitope having the amino acid sequence RGHLRIAGHHLGRCDIKDLP (SEQ ID NO: 306), that is found within the four 23mer epitopes shown in SEQ ID NOs: 307-310. FIG. 31D shows results confirming that T cells expressing TCR115 strongly recognized the 20mer epitope, whereas negative control T cells expressing a different receptor (TCR117) did not.

[0640] The CD4 helper T cell epitope of SEQ ID NO: 306 recognized by TCR115 is derived from the Membrane Glycoprotein (M protein) of SARS-CoV-2. A nine amino acid subsequence found within this 20mer HLA-II epitope (HLRIAGHHL; SEQ ID NO: 311) has also been reported to be an HLA-I class I epitope (Grifoni et al. (2020) Cell Host & Microbe, 27:671-680). An 18mer epitope that partially overlaps the 20mer of SEQ ID NO: 306, having the amino acid sequence GAVILRGHLRIAGHHLGR (SEQ ID NO: 312), has also been reported to be a CD4 T cell epitope (Peng et al. (2020) Nat. Immunol., published Sep. 4, 2020).

[0641] The T cell epitope recognized by TCR115 was further analyzed to compare the peptide presentation capacity of different HLA-II molecules. Five different HLA-II molecules were tested: DRB1*11:01, DRB1*07:01, DRB1*04:04, DRB1*15:01 and DRB1*10:01. Four different 23mer peptides (SEQ ID NOs: 307-310), each containing the 20mer sequence of SEQ ID NO: 306, were tested. Additionally, the overlapping 18mer peptide of SEQ ID NO: 312, reported to be a CD4 epitope, was also tested as a positive control.

[0642] The results are shown in FIG. 32, showing the binding of the 23mer epitopes (SEQ ID NOs: 307-310) in grey and the binding of the 18mer epitope (SEQ ID NO: 312) in grey. Additionally, the netMHCIIpanII prediction for binding is shown in grey, with the threshold for positive shown as the horizontal line. The results showed that all five HLA-II molecules tested bound all four 23mers, as well as the 18mer, well about the threshold level for positivity. This is in contrast to the predicted binding from netMHCIIpanII, indicating that the MCR™ system was successful in identifying an (unpredicted) MHCII-restricted CD4 helper T cell epitope with good presentability across a panel of HLA-II alleles.

[0643] Overall, these experiments further confirm that use of the MCR™ system is an effective approach for identifying T cell epitopes for T cell clones obtained from symptomatic COVID-19 patients. These experiments further identify epitopes comprising the sequence of SEQ ID NO: 306 (e.g., the sequences of SEQ ID NOs: 307-310) as MHCII-restricted CD4 helper T cell epitopes with good presentability across a panel of HLA-II alleles.

### Example 20: SARS-CoV-2 T cell Epitope Identification Using Peptide-MHC Tetramers

[0644] In this Example, peptide-MHC tetramers were loaded with a SARS-CoV-2 9mer epitope library and screened as described in Example 18 for T cell recognition using three different MHC I alleles: A*02:01, A*24:02 and B*07:02. T cell clones obtained from COVID-19 convalescent patients, as well as unexposed controls, were analyzed.

[0645] The results showed hits across all three HLA-I alleles tested. 1248 unique clones were tested (200 with high confidence). Hits were obtained for 521 unique epitopes, 20 with high confidence. High confidence hits were further validated by T cell functional assay using an NFAT reporter gene functional assay. The 9mer sequences for the 20 highest confidence hits are shown below in TABLE 8, along with their MHC restriction and the SARS-CoV-2 antigen from which they are derived.

TABLE 8
Exemplary T cell Epitopes

| Epitope | MHC | | SEQ |
|---|---|---|---|
| Sequence | Restriction | SARS-CoV-2 Ag | ID NO: |
| LLYDANYFL | A*02:01 | 3A protein | 286 |
| KLWAQCVQL | A*02:01 | ORF1AB | 287 |
| YLQPRTFLL | A*02:01 | Spike protein | 288 |
| FLLNKEMYL | A*02:01 | ORF1AB | 289 |
| GLMWLSYFI | A*02:01 | M protein | 294 |
| ALWEIQQVV | A*02:01 | ORF1AB | 297 |
| SVLLFLAFV | A*02:01 | E protein | 313 |
| MLDMYSVML | A*02:01 | ORF1AB | 314 |
| KLNEEIAII | A*02:01 | ORF1AB | 315 |
| NYMPYFFTL | A*24:02 | ORF1AB | 316 |
| VYIGDPAQL | A*24:02 | ORF1AB | 317 |
| QYIKWPWYI | A*24:02 | Spike protein | 318 |
| YYTSNPTTF | A*24:02 | ORF1AB | 319 |
| NYNYLYRLF | A*24:02 | Spike protein | 320 |
| YYQLYSTQL | A*24:02 | 3A protein | 321 |
| VYAWNRKRI | A*24:02 | Spike protein | 322 |
| SPRWYFYYL | B*07:02 | N protein | 323 |
| RIRGGDGKM | B*07:02 | N protein | 324 |
| KPRQKRTAT | B*07:02 | N protein | 325 |
| QPGQTFSVL | B*07:02 | ORF1AB | 326 |

[0646] The epitope hits showed excellent alignment with published studies, confirming the accuracy of the peptide-MHC tetramer screening approach. Further analysis of the top 20 hits (shown in TABLE 8) is summarized in FIG. 33. This figure shows the breadth/depth for each antigen (% samples, #clones, #cells), as well as the epitope homology to five other coronaviruses (SARS, HKU1, OC43, 229E, NL63). Results are shown for A*02:01, A*24:02 and B*07:02 for convalescent T cells and for B*07:02 for unexposed T cells. The top hits from the screen were detected in 14%-100% of the samples tested with the appropriate HLA-I allele.

[0647] Most epitopes were homologous to SARS, but less so to endemic coronaviruses. However, two of the top hits did show strong homology with endemic coronaviruses, VYIGDPAQL (SEQ ID NO: 317), which is from ORF1AB and restricted to A*24:02 and SPRWYFYYL (SEQ ID NO: 323), which is from the N protein and restricted to B*07:02. Notably, reactivity to the epitope of SEQ ID NO: 323 was detected in every convalescent sample tested and in almost half (42%) of unexposed patients.

[0648] In summary, these experiments further confirmed that use of the peptide-MHC tetramer system is an effective approach for identifying T cell epitopes for T cell clones obtained from COVID-19 patients. These experiments further identified epitopes comprising the 9mer sequences of SEQ ID NOs: 286-289, 294, 297 and 313-326 as MHCI-restricted T cell epitopes. In particular, SEQ ID NOs: 286-289, 294, 297 and 313-315 were identified as A*02:01-restricted epitopes, SEQ ID NOs: 316-322 were identified as A*24:02-restricted epitopes and SEQ ID NOs: 323-326 were identified as B*07:02-restricted epitopes. Epitopes were identified from six different SARS-CoV-2 antigens: ORF1AB (SEQ ID NOs: 287, 289, 297, 314-317, 319 and 326), Spike protein (SEQ ID NOs: 288, 318, 320 and 322), N protein (SEQ ID NOs: 323-325), M protein (SEQ ID NO: 294), 3A protein (SEQ ID NOs: 286 and 321) and E protein (SEQ ID NO: 313). The experiments revealed that a handful of dominant epitopes are emerging and the most reactive epitopes may have assistance by endemic coronavirus, given the level of reactivity to certain epitopes observed in unexposed patient samples. In particular, the N protein-derived, B*07:02-restricted epitope SPRWYFYYL (SEQ ID NO: 323) showed reactivity with all convalescent patient samples tested and almost half of unexposed patients, indicating it is a dominant T cell epitope.

### Example 21: High Resolution Profiling of MHC-II Peptide Presentation Capacity Reveals SARS-CoV-2 Targets for CD4 T Cells and Mechanisms of Immune-Escape

[0649] Understanding peptide presentation by specific MHC alleles is fundamental for controlling physiological functions of T cells and harnessing them for therapeutic use. Currently, two strategies are used: characterization of peptides eluted from purified MHC molecules by mass spectroscopy or in-silico prediction of peptide presentation. However, both approaches have their limitations in sensitivity, precision and throughput, in particular for MHC class II. In this Example, MEDi, a novel mammalian epitope display system which allows an unbiased, affordable, high-resolution mapping of MHC peptide presentation capacity was used. This platform provides a detailed picture by testing every antigen-derived peptide and is scalable to all the MHC alleles. Given the urgent need to understand immune evasion for formulating effective responses to threats like SARS-CoV-2, a comprehensive analysis of the presentability of all SARS-CoV-2 peptides, in the context of several HLA class II alleles was conducted.

[0650] This Example demonstrates that some mutations arising in the viral strains expanding globally resulted in reduced peptide presentation by multiple HLA class II alleles, while some increased it, suggesting alteration of MHC-II presentation landscapes as a possible immune escape mechanism.

[0651] Decoding antigen presentation in the context of individual HLA alleles is central for understanding immune homeostasis and protection from pathogens and underlies the design of immune medicines. Precise and comprehensive analysis of the short peptides presented by the MHC molecules is therefore of major interest. The main approaches used currently, analysis of MHC-eluted peptides by liquid chromatography with tandem mass spectrometry (LC-MS/MS) and in-silico prediction algorithms, have contributed to the understanding of peptide presentation. However, they do not provide complete presentability landscapes across many HLAs. LC-MS/MS analysis allows the identification of thousands of naturally presented peptides, but it is technically challenging and requires very large numbers of cells (i.e. 10⁸ to 10¹⁰) for good coverage (Sofron, A. et al. (2016) Eur. J. Immunol. 46:319-328, and Kowalewski, D. J. et al. (2015) Proc. Natl. Acad. Sci. 112:E6254-E6256). Moreover, presentation of peptides with proven T cell reactivity can be missed (Kowalewski, D. J. et al. (2015) Proc. Natl. Acad. Sci. 112:E6254-E6256).

[0652] The limited sensitivity of LC-MS/MS is especially problematic when working with small tissue samples like human biopsies. Attempting to circumvent these problems, computational prediction methods have been developed and are relatively reliable in identifying strong (IC50<50 nM) MHC I-binders (Röhn, T. A. et al. (2005) Cancer Res. 65:10068-10078). This method is particularly useful for HLA class II, but due to the expression of several HLA alleles on DCs, determination of the individual restriction requires additional experiments. Attempting to circumvent these problems, computational prediction methods have been developed and are relatively reliable in identifying strong (IC50<50 nM) MHC I-binders (Zhao, W. & Sher, X. (2018) PLOS Comput. Biol. 14:e1006457). While for MHC II the algorithms are also improving (Jensen, K. K. et al. (2018) Immunology 154:394-406), the efficiency in predicting MHC-binding peptides is quite variable and limited. In this respect, the recently improved NetMHCIIpan4 shows better performance than conventional binding prediction algorithms but is accurate only for a limited number of alleles, owing to the lack of suitable peptide datasets for training. To circumvent this, a recently published study improved algorithm performance using yeast-display peptide libraries (Reynisson, B. et al. (2020) J. Proteome Res. 19:2304-2315). (Rappazzo, C. G. et al. (2020) Nat. Commun. 11:4414). Still, there is a big gap from the several HLAs with high-quality in-silico prediction scores and the thousands of unique HLA alleles present in the human population.

[0653] Predicting antigen presentation by MHC is further complicated by the fact that it is a dynamic process and can change depending on the physiological state of the cell. It is also regulated by tightly controlled chaperones like HLA-DM (Sloan, V. S. et al. (1995) Nature 375:802-806), dysregulation of which has been linked to autoimmune disease progression (Amria, S. et al. (2008) Eur. J. Immunol. 38:1961-1970; Zhou, Z. et al. (2017) Eur. J. Immunol. 47:314-326), while high expression of HLA-DM correlated with improved survival in cancer patients (Oldford, S. A. et al. (2006) Int. Immunol. 18:1591-1602). Thus, an unbiased method, testing pure peptide presentation capacity of the MHC not obscured by other physiological factors, would help getting the complete picture of all possible pMHC ligands present in a given protein. This reductionist approach could provide a basic set of allele-specific peptides (the presentable peptide space) ready for the generation of peptide libraries for screening of T cell reactivities or the generation of pMHC tetramers. Taking this set as a basis, subsets of peptides could be derived by incorporating protein processing and chaperone functions, dependent on cellular state and chaperone expression levels.

[0654] Severe acute respiratory syndrome coronavirus 2 (SARS-CoV-2) is the infectious agent responsible for the worldwide COVID-19 pandemic with over two million fatalities (Peiris, J. S. M. et al. (2003) The Lancet 361:7; Matheson, N. J. & Lehner, P. J. (2020) Science 369:510-511). Several companies are now providing vaccines inducing humoral and cellular responses against SARS-CoV-2, but for long lasting protection, generation of T cell memory will be required (Peng, Y. et al. (2020) Nat. Immunol. 21:1336-1345), even if pre-existing T cell immunity to common cold coronavirus might play a role (Nelde, A. et al. (2020) Nat. Immunol. 22:74-85; Grifoni, A. et al. (2020) Cell 181:1489-1501.e15; Sette, A. & Crotty, S. Adaptive immunity to SARS-CoV-2 and COVID-19, 21). Because protection by antibodies is related to protein function (e.g., blocking receptors that are required for viral cell entry), and/or protein localization (surface expression to allow opsonizing antibodies to bind), it has limited target space, increasing selection pressure for pathogen escape. Protection by T cells, on the other hand, relies entirely on TCR recognition of pathogen-derived peptides presented by MHC and is mostly independent of physiological function or localization of the target protein. Consequently, while only particular epitopes of surface proteins allow targeting by neutralizing antibodies, many peptides can serve as T cell targets, providing a much bigger epitope space for therapeutic development. Clearly, a high-resolution map of all SARS-CoV-2 presentable peptides resolved on different HLA alleles would greatly help these efforts.

[0655] In this work, utilizing a novel mammalian epitope display system called MEDi, the capacity of several HLA alleles to present SARS-CoV-2 virus peptides was tested. The findings were validated biologically by studying T cell recognition of the SARS-CoV-2 virus in acute COVID-19 patients and analyzed the impact of mutations carried by the novel SARS-CoV-2 strains. The results provided herein suggest immune evasion based on shifting peptide presentation away from well recognized CD4 epitopes. Given the importance of CD4 T cells in controlling B cell and CD8 T cell responses in COVID-19 patients, the results described here may help guide the generation of vaccines or therapeutics designed to elicit efficient cellular immunity.

### Material and Methods

[0656] MEDi Procedure and Score Calculation

[0657] Libraries carrying 15-amino acid (aa) long peptides, spanning the entire sequences of the SARS-CoV-2 virus, were cloned as oligonucleotides (Twist) into chimeric MHC/TcR receptor (MCR) vectors carrying different HLA alleles. 16.2× reporter cell line was transduced with these libraries and surface expression of the MCR molecules was analyzed by flow cytometry. Four fractions were sorted: Fr.0 (cells expressing no detectable MCRs on the surface), Fr.1 (cells expressing low levels of MCRs), Fr.2 (cells expressing intermediate levels of MCRs), Fr.3 (cells expressing high levels of MCRs). Peptides carried by the MCRs from sorted cells were amplified from cDNA by RT-PCR using the peptide flanking regions and sequenced on a miniSeq (Illumina). Sequences from the Illumina output files were trimmed, merged and translated using the CLC genomic workbench program. Counting and further analysis was done with FilemakerPro18 and Excel (Microsoft).

[0658] The individual peptide counts in each fraction were normalized to the total counts in the fraction. For each peptide, a MEDi score was calculated with the following formula: sum_i [(Frindex_i*Frcount_i)/sum_i(Frcount_i)]. Fr_indexes: Fr1=1, Fr2=2, Fr3=4, Fr4=28. MEDi-MA was calculated by averaging MEDi scores for 5 peptides (−2/−1/0/1/2) and assigned to the middle(0) peptide, except for FIG. 39 and FIG. 54 where MEDi-MA was calculated by averaging MEDi scores for 3 peptides (−1/0/1). MEDi-MA85 indicates the threshold calculated as the 85th percentile of the MEDi-MA score for the individual protein.

[0659] MEDi MA Score Quality Threshold.

[0660] MEDi MA score for a given peptide was considered of good quality if at least 40 reads were collected for a peptide and the MEDi MA value had a coefficient of variation (CV=Std.Deviation/Average) lower than 0.75.

[0661] Local Maximum of MEDi MA Peak Definition

[0662] Local maximum of 7 MEDi MA scores was determined (−3/−2/−1/0/1/2/3) and assigned to the middle(0) peptide.

[0663] MCR2 Screening

[0664] Libraries were generated by cloning all SARS-CoV-2-derived peptides in MCR2 molecules carrying the complete viral genome in 23mers shifted by 1 aa. For screening, the libraries were pooled at equal ratios, generating a combined patient-specific library of roughly 120,000 different peptide-MCR2 combinations. MCR2 screening was performed as described previously (Kisielow, J. et al. (2019) Nat. Immunol. 20:652-662). Briefly, MCR2 expressing 16.2× cells were co-cultured with cell clones expressing one specific TCR selected from Liao et al. (Nat. Med. (2020) 26:842-844) in a ratio of 1:5 to 1:10. Cells were mixed and co-cultured for 8-12 hours in a standard tissue culture medium, in the presence of 13 μg/mL anti-mouse FasL antibodies (BioXcell) to inhibit induction of cell death during incubation. After harvesting, reporter cells positive for NFAT signaling were sorted on a BD FACS Aria Fusion Cell Sorter as bulk or into 96 well plates for further expansion. Expanded single cells were harvested, DNA was isolated (Kapa Express Extract) followed by Sanger sequencing of the MCR2 alpha and beta chain including the linked antigen. When overlapping peptides were found in the screen (e.g., FIG. 36A and TABLE 9), the common part as the specific peptide recognized by the TCR was listed.

[0665] TABLE 9 depicts exemplary peptides identified in the screen

TABLE 9

| Sequence | SEQ ID NO: |
|---|---|
| PLVSSQCVNLTTRTQ | 1327 |
| PAYTNSFTRGVYYPD | 1328 |
| DKVFRSSVLHSTQDL | 1329 |
| FRSSVLHSTQDLFLP | 1330 |
| PFFSNVTWFHAIHVS | 1331 |
| NVTWFHAIHVSGTNG | 1332 |
| GVYFASTEKSNIIRG | 1333 |
| DSKTQSLLIVNNATN | 1334 |
| SLLIVNNATNVVIKV | 1335 |
| IYSKHTPINLVRDLP | 1336 |
| LPIGINITRFQTLLA | 1337 |
| TLLALHRSYLTPGDS | 1338 |
| VGYLQPRTFLLKYNE | 1339 |
| TVEKGIYQTSNFRVQPT | 1340 |
| NFRVQPTESIVRFPN | 1341 |
| NFRVQPTESIVRFPN | 1342 |
| NVYADSFVIRGDEVR | 1343 |
| FNFNGLTGTGVLTES | 1344 |
| IYQAGSTPCNGVEGF | 1345 |
| NLVKNKCVNFNFNGL | 1346 |
| FNFNGLTGTGVLTES | 1347 |
| TWRVYSTGSNVFQTR | 1348 |
| NSPRRARSVASQSII | 1349 |
| ASQSIIAYTMSLGAE | 1350 |
| ENSVAYSNNSIAIPT | 1351 |
| AQVKQIYKTPPIKDF | 1352 |
| FNKVTLADAGFIKQY | 1353 |
| QKFNGLTVLPPLLTD | 1354 |
| AQYTSALLAGTITSG | 1355 |
| PFAMQMAYRFNGIGV | 1356 |
| FNGIGVTQNVLYENQ | 1357 |
| IANQFNSAIGKIQDS | 1358 |
| DSLSSTASALGKLQD | 1359 |
| TQQLIRAAEIRASAN | 1360 |
| AEIRASANLAATKMS | 1361 |
| ANLAATKMSECVLGQ | 1362 |
| KYFKNHTSPDVDLGD | 1363 |

[0666] Single Chain Trimer (SCT) Screening

[0667] Single chain trimers of class I HLAs of all seven patients were generated by linking the leader sequence, epitope, β2m and HLA alpha chain with 3×G4S linkers, transmembrane and intracellular domain were cloned from the CD247 molecules. Each alpha chain was modified/mutated to open the groove of class I by introducing the Y84A mutation in every alpha chain.

[0668] For SCT, libraries were used that covered the whole SARS-CoV-2 genome with 10mers shifted by 1 amino acid cloned as oligonucleotides into the SCTz vectors.

[0669] Fluorescence Polarization Assay

[0670] The MHC II α- and β-chain extracellular domains were recombinantly expressed with C-terminal Myc and His tag sequences, respectively. For DRB1*15:01 the Myc tag was replaced with a V5 tag. The N-terminus of the β-chain was fused to CLIP peptide followed by a flexible Factor Xa-cleavable linker. Both α- and β-chains were co-expressed in CHO cells and secreted into the expression medium as a stable CLIP-loaded heterodimer. Heterodimerization of the α- and β-chains of DRB1*07:01 and DRB1*1501 was forced using a fusion of an engineered human IgG1-Fc protein to each chain (Gunasekaran, K. et al. (2010) J Biol. Chem. 285:19637-19646). Following CHO expression, the heterodimer was purified by immobilized metal ion affinity chromatography and size exclusion chromatography (SEC). The fluorescence polarization assay was performed as described in Yin, L. & Stern, L. J. (2014) Curr. Protoc. Immunol. 106:5.10.1-5.10.12 with few modifications. Following Factor Xa cleavage, 100 nM of HLA were incubated overnight with 25 nM fluorescent probe and various concentrations of the indicated peptide competitor in 100 mM Sodium citrate pH 5.5, 100 mM NaCl, 0.1% octylglucoside and 1× protease inhibitors (SigmaFast) at 30° C. The fluorescent probe for DRB1*04:04, DRB1*07:01 and DRB1*11:01 was PRFV(K/Alexa488)QNTLRLAT. The fluorescent probe for DRB1*15:01 was ENPVVHFF(C/Alexa488Mal)NIVTPR.

### Results

[0671] MEDi, a Mammalian Epitope Display Platform Based on MCR

[0672] Using the MCR system, an immunogenic, murine leukemia virus envelope protein-derived mutant peptide (MLVenvs126R,D127v, aka envRV) was identified as being efficiently recognized by mouse tumor infiltrating lymphocytes (Kisielow, J. et at (2019) Nat. Immunol. 20:652-662). While MCR2 molecules carrying envRV were expressed well on the surface of the reporter cells, the ones carrying the nonmutated WT peptide (env) could not be detected, consistent with netMHCIIpan affinity predictions. Given that MHC molecules without a bound peptide were unstable (Rabinowitz, J. D. et al. (1998) Immunity 9:699-709 this observation led to the hypothesis that peptides fitting well into the peptide binding groove and therefore being efficiently presented by the MHC, may effectively stabilize the MCR2 molecules on the surface of cells. In contrast, peptides not well presented by the MHC destabilize the MCR2 molecules and therefore little, if any, cell surface expression will be detected. This hypothesis was tested. A number of peptides with biochemically tested I-Ab binding affinity ranging from 7.5 nM to 10,000 nM (TABLE 10) were cloned.

TABLE 10
I-Ab presented peptides cloned in MCR2 vector

| Number | Peptide | SEQ ID NO: | IC50 |
|---|---|---|---|
| 1 | KSAFQSSVASGFIGF | 1417 | 7.56 |
| 2 | ISGYNFSLSAAVKAG | 1418 | 32.3 |
| 3 | IEYAKLYVLSPILAE | 1419 | 282 |
| 4 | FSLSAAVKAGASLID | 1420 | 638 |
| 5 | SLINSMKTSFSSRLL | 1421 | 1700 |
| 6 | LLNNQFGTMPSLTLA | 1422 | 4740 |
| 7 | GLVSQLSVLSSITNI | 1423 | 5280 |
| 8 | YDMFNLLLMKPLGIE | 1424 | 6750 |
| 9 | LIEDYFEALSLQLSG | 1425 | 6760 |
| 10 | IIKYNRRLAKSIICE | 1426 | 8390 |
| 11 | NKVKSLRILNTRRKL | 1427 | 8580 |
| 12 | AWENTTIDLTSEKPA | 1428 | 10000 |

[0673] The clones of the peptides were transduced into 16.2× reporter cell line and determined the MCR2 expression by flow cytometry and staining with I-Ab and CD3 specific antibodies. As expected, there was a clear linear correlation between both stainings, but CD3 allowed a better separation of the positive and negative populations. As a result, anti-CD3 staining was used in further MEDi analyses, with the added advantage of being MHC agnostic and therefore universally usable with all mouse H-2 and human HLA haplotypes. MCR2 expression dependence on peptide-I-Ab binding affinity was measured by the mean fluorescence. It was found that the MCR2s carrying peptides with a good I-Ab binding affinity were expressed on the surface at high levels, while MCR2s presenting low affinity peptides showed lower surface expression. Peptides with an affinity below 1 μM (IC₅₀) were considered good MHC-binders and all MCRs carrying such peptides were expressed well on the cell surface. In addition, some peptides with lower MHC binding affinity appeared on the surface, indicating that linking peptides directly to the MHC beta chain stabilizes low-affinity peptide-MHC interactions. Being able to test the presentation of such peptides was important, as self-peptides known as targets in autoimmune diseases often bind MHC with low affinity (Stadinski, B. D. et al. (2010) Proc. Natl. Acad. Sci. 107:10978-10983). Six (6) out of 6 peptides with an I-Ab binding affinity below 5 μM (IC₅₀) stabilized MCR2 surface expression, while for peptides with lower binding affinity, MCR expression was variable and generally much lower. Some of the MCR2s carrying peptides with an apparently low affinity (e.g., 8.39 μM) were expressed on the surface at good levels, suggesting that additional factors apart from pure binding affinity (measured in vitro), regulate peptide-MHC interactions. Similarly, the envRV peptide could stabilize MCR2 expression, even if its I-Ab binding affinity was predicted by netMHCIIpan to be very low at 7.7 μM. As a result, high amounts of envRV peptide were added for in vitro T cell stimulations by dendritic cells (Kisielow, J. et al. (2019) Nat. Immunol. 20:652-662).

[0674] Analysis of SARS-CoV-2 Peptides Presentability by Common HLA Alleles.

[0675] Considering the recent interest in SARS-CoV-2 T cell epitopes effectively presented across the possibly highest number of HLA alleles, MEDi was used to determine the presentability of all peptides encoded in the SARS-CoV-2 genome in the context of some of the most common HLA class II haplotypes. The critical role of CD4 T cell help in supporting B cell and CD8 T cell responses is well known and also crucial for COVID-19 protection (Le Bert, N. et al. (2020) Nature (2020) 584:457-462; Juno, J. A. et al. (2020) Nat. Med. (2020) 26:1428-1434). However, a complete picture of the important MHC class II epitopes was missing, as they are more difficult to predict by computer algorithms than MHC class I ligands. To achieve a good resolution, all possible 15aa peptides derived from the SARS-CoV-2 genome (FIG. 35A), shifted by 1 aa, were cloned into MCR2 vectors containing extracellular domains of the HLAs: DRB1*04:04, DRB1*07:01, DRB1*08:03, DRB1*11:01, DRB1*14:05, DRB1*15:01 and DPA1*02:02/DPB1*05:01 (FIGS. 35A, B, C, and D). These libraries were transduced into the 16.2× reporter cell line, stained for CD3 and sorted the cells into 4 fractions (neg, low, mid and hi) based on the surface expression level of the MCR2 (FIG. 35A). The peptides carried by the MCR2s in the different fractions were determined by RT-PCR and deep sequencing. For each peptide a MEDi score was calculated and plotted against the position of the starting amino acid of the peptide within the protein (see Methods). FIG. 35B shows plots of the MEDi score moving average (MEDi-MA, average of 5 peptides) for the SARS-CoV-2 Spike peptide presentability by a set of 5 HLA alleles. Peptides derived from particular regions of the protein stabilized surface expression of the MCR better than others and so are being better presented by the MHC. Such peptides grouped in regions (“peaks/waves”), indicating that a core MHC-binding epitope was present in a number of peptides starting at several consecutive amino acids (FIGS. 35C and D, and TABLE 11).

[0676] TABLE 11 Exemplary peptides and respective HLA alleles identified in the screen. TABLE 11

| Sequence | SEQ ID NO: | HLA |
|---|---|---|
| GAVILRGHLRIAGHH | 1364 | DRB1*11:01 |
| AVILRGHLRIAGHHL | 1365 | DRB1*11:01 |
| VILRGHLRIAGHHLG | 1366 | DRB1*11:01 |
| ILRGHLRIAGHHLGR | 1367 | DRB1*11:01 |
| LRGHLRIAGHHLGRC | 1368 | DRB1*11:01 |
| RGHLRIAGHHLGRCDIKDLP | 1369 | DRB1*11:01 |
| GHLRIAGHHLGRCDI | 1370 | DRB1*11:01 |
| HLRIAGHHLGRCDIK | 1371 | DRB1*11:01 |
| LRIAGHHLGRCDIKD | 1372 | DRB1*11:01 |
| GMEVTPSGTWLTYTG | 1373 | DRB1*07:01 |
| MEVTPSGTWLTYTGA | 1374 | DRB1*07:01 |
| EVTPSGTWLTYTGAI | 1375 | DRB1*07:01 |
| VTPSGTWLTYTGAIK | 1376 | DRB1*07:01 |
| TPSGTWLTYTGAIKL | 1377 | DRB1*07:01 |
| PSGTWLTYTGAIKLD | 1378 | DRB1*07:01 |
| SGTWLTYTGAIKLDDKDPNFK | 1379 | DRB1*07:01 |
| GTWLTYTGAIKLDDK | 1380 | DRB1*07:01 |
| TWLTYTGAIKLDDKD | 1381 | DRB1*07:01 |
| WLTYTGAIKLDDKDP | 1382 | DRB1*07:01 |
| LTYTGAIKLDDKDPN | 1383 | DRB1*07:01 |
| TYTGAIKLDDKDPNF | 1384 | DRB1*07:01 |
| YTGAIKLDDKDPNFK | 1385 | DRB1*07:01 |

[0677] This observation is consistent with the fact that, owing to its open peptide-binding groove, MHC class II molecules present peptides of different length (Sofron, A. et al. (2016) Eur. J. Immunol. 46:319-328). Usually the minimal MHC-binding core is composed of 9aa as shown by the commonly described binding motifs (Andreatta, M. et al. (2011) PLoS ONE 6:11)), even if residues outside of it also contribute to the MHCbinding affinity (O'Brien, C. et al. (2008) Immunome Res. 4:6). As expected, MEDi graphs derived from these analyses showed a diverse presentation pattern. Each HLA molecule was unique, with regions of specific and promiscuous peptide presentation.

[0678] To account for data quality differences related to sorted cell numbers and sequencing depth, a MEDi-MA quality metric composed of a minimal read count and the coefficient of variation (see Materials & Methods) was applied. Graphs in FIG. 35B show that the best results were obtained for DRB1*07:01 and DRB1*15:01 and DPA1*02:02/DPB1*05:01, while DRB1*14:05 and DRB1*08:03 showed lower quality. As a result, most of the MEDi platform testing was performed on DRB1*07:01 and DRB1*15:01.

[0679] To distill the best HLA-binding epitopes from this data, peptide sequences scoring above the 85th percentile (MEDi-MA85) were selected. As an example, FIG. 40 provides a list of presentable peptides derived from the Spike protein. This analysis was performed on all peptides derived from the SARS-CoV-2 genome in the context of 3 HLAs. Of note, the spike list contains peptides greatly overlapping with the immunogenic peptides described in recent literature (Peng, Y. et al. (2020) Nat. Immunol. 21:1336-1345; Nelde, A. et al. (2020) Nat. Immunol. 22:74-85).

[0680] Validation of MEDi by a Competitive Peptide Binding Assay.

[0681] Next, peptides from the Spike protein in major MEDi MA⁸⁵ peaks were analyzed for the presence of a binding motif and an enrichment of known (Andreatta, M. et al. (2011) PLoS ONE 6:11), appropriately spaced anchor residues in most of the selected peptides (FIG. 36A: DRB1*07:01, and TABLE 9; and FIG. 43A: DRB1*15:01) was identified, thus validating the assay. Still, because tethering peptides to the MCR might stabilize some low affinity interactions not efficiently presented in vivo, independent validation and quantification of the HLA binding of the peptides was performed by MEDi. To this end, measurements of competitive peptide binding by fluorescence polarization were performed (Yin, L. & Stern, L. J. (2014) Curr. Protoc. Immunol. 106:5.10.1-5.10.12) fora set of Spike peptides for DRB1*07:01. Thirty-three (33) peptides were selected representing MEDi MA peaks and 10 peptides representing valleys (FIG. 36B) and considered peptides with IC₅₀ below 10 μM as binders. When IC₅₀ calculation was impossible due to very low peptide binding it was set arbitrarily to 20 μM. 20 out of the 23 peptides (87%) corresponding to MEDi-MA85 peaks bound to the HLA with IC₅₀ between 85 nM to 10 μM (FIG. 36C, peptide sequences listed in TABLE 12), 13 of them below 1 μM. From the remaining 10 peaks, three peptides bound to the HLA (IC₅₀ 442 nM, 1,630 nM and 7.3 μM) but missed MEDi-MA85 cut-off by a small margin (FIG. 36C), and for the rest, no binding could be shown. For peptides from the valleys, 2 out of 10 (20%) bound to the HLA with low affinity, while the rest did not bind (FIG. 36C). This data set allowed us to analyze the ability of the MEDi assay to qualify peptides for HLA presentation and compare it to netMHCIIpan. Receiver operating characteristic curves (ROC) were plotted for different IC₅₀ cut-offs and compared MEDi-MA scores to netMHCIIpan EL rank (FIG. 36D). Overall, the performance of both methods was comparable, with MEDi performing better for low affinity peptides (1 μM and 5 μM IC₅₀ cut-offs: AUC 87.5% to 86% and 88% to 82% respectively), while netMHCIIpan was better for the 500 nM IC₅₀ cut-off (AUC 89.8% to 80.2%).

[0682] TABLE 12. Exemplary peptide sequences tested for binding to DRB1*07:01.

TABLE 12

| SEQ ID NO: | Sequence |
|---|---|
| 1386 | PLVSSQCVNLTTRTQ |
| 1387 | PAYTNSFTRGVYYPD |
| 1388 | VSGTNGTKRFDNPVL |
| 1389 | STEKSNIIRGWIFGT |
| 1390 | NVVIKVCEFQFCNDP |
| 1391 | TFEYVSQPFLMDLEG |
| 1392 | IYSKHTPINLVRDLP |
| 1393 | TLLALHRSYLTPGDS |
| 1394 | PLSETKCTLKSFTVE |
| 1395 | TVEKGIYQTSNFRVQPT |
| 1396 | NFRVQPTESIVRFPN |
| 1397 | KRISNCVADYSVLYN |
| 1398 | KLPDDFTGCVIAWNS |
| 1399 | STPCNGVEGFNCYFP |
| 1400 | FNFNGLTGTGVLTES |
| 1401 | KKFLPFQQFGRDIAD |
| 1402 | GTNTSNQVAVLYQDV |
| 1403 | TWRVYSTGSNVFQTR |
| 1404 | NSPRRARSVASQSII |
| 1405 | ASQSIIAYTMSLGAE |
| 1406 | VTTEILPVSMTKTSV |
| 1407 | TSVDCTMYICGDSTE |
| 1408 | TQLNRALTGIAVEQD |
| 1409 | DPSKPSKRSFIEDLL |
| 1410 | PFAMQMAYRFNGIGV |
| 1411 | DSLSSTASALGKLQD |
| 1412 | AEIRASANLAATKMS |
| 1413 | PQIITTDNTFVSGNC |
| 1414 | DSLSSTASALGKLQD |
| 1415 | AEIRASANLAATKMS |
| 1416 | PQIITTDNTFVSGNC |

[0683] Next, using 30 of these peptides, an unbiased analysis was performed for DRB1*15:01 (FIG. 43). Here, because the peptides were chosen according to MEDi data for DRB1*07:01, most peptides corresponded to MEDi scores below the 85^{th} percentile threshold and were not in major peaks (FIG. 43A and FIG. 43B), in other words they should not be well presented. Indeed, the majority did not bind the HLA with sufficient affinity (FIG. 43C). Nevertheless, 10 of the peptides were in peaks above the threshold and 7 bound to HLA. The two peptides with the highest IC₅₀ (122 nM and 241 nM) corresponded to 2 of the 5 highest MEDi MA85 peaks and were on the top of the MEDi ranking NetMHCIIpan placed them lower at the 3′ and 30′ rank. On the other hand, 4 of 7 HLA binding peptides (IC50 from 3 10 nM to 663 nM) missed the MEDi 85^{th} percentile threshold, two of them by a small margin, possibly due to low quality data in these regions. NetMHCIIpan also did not qualify 3 of the 7 binding peptides as good HLA binders but placed them at slightly higher positions in the overall ranking (FIG. 43D). Both methods performed similarly for this well characterized HLA allele. These results validate the MEDi platform as a means to select peptides highly presentable by an HLA allele.

De-Orphaning TCRs from the Bronchoalveolar Lavages (BAL) of Acute COVID-19 Patients.

[0684] To further test MEDi and the proposed scoring approach for antigen presentability the analysis was extended to natural T cell targets. Although T cell SARS-CoV-2 reactivities against peptides scattered across the viral genome have been reported, analyses that comprehensively decode “immune synapses”, including TCR alpha and beta chain sequences, the recognized peptide and the presenting HLA, are sparse. Thus, the MCR technology (Kisielow, J. et al. (2019) Nat. Immunol. 20:652-662) (FIG. 37A) was used and single chain trimers (Hansen, Ted. H. & Lybarger, L. (2006) Cancer Immunol. Immunother. 55:235-236) (linked to the intracellular domain of the TCR zeta chain (SCTz) (Zhang, T. et al. (2004) FASEB J. 18:600-602; Joglekar, A. V. et al. (2019) Nat. Methods 16:191-198), to de-orphan TCRs of enriched clonotypes from the BALs of COVID-19 patients, described recently by Liao et al. (Nat. Med. (2020)26:842-844). Liao et al., provided high resolution single cell data indicating aberrant cellular responses and identified expanded T cell clonotypes, but they neither decoded their antigenic specificity, nor the HLA restriction. To address this, the 109 most enriched TCRs were cloned, expressed in a T cell line, and subjected to an unbiased epitope screening. This included MCR2 libraries containing all possible 23aa SARS-CoV-2-derived peptides (1aa shifts through all proteins) and libraries containing all possible 10aa SARS-CoV-2-derived peptides presented in the context of SCTz. This setup allowed for an unprecedented, complete screen of all SARS-CoV-2 peptides in the context of all HLAs from every patient (FIG. 41). Screening these patient specific MCR2 libraries of approximately 120,000 different peptide-MCR2 combinations and 60.000 peptide-SCTz combinations required at least 4 rounds of enrichment (FIG. 37B) before single cell clones revealed the specific peptides and the presenting HLA alleles (FIG. 37C). As expected, not all TCRs showed reactivity against SARS-CoV-2 antigens, but the cognate peptides and the HLA restriction for 8 CD4 and 3 CD8 TCRs were identified (FIG. 37C, FIG. 37D).

[0685] A variety of peptides presented by several HLA alleles were found. For example, 3 CD4 T cell clones from severely affected patient C148 recognized peptides from the SARS-CoV-2 proteins spike (S), membrane glycoprotein (M) and nucleocapsid (N), all presented by DRB1*07:01. TCR091 from patient C141, reacted with the membrane glycoprotein-derived peptide M₁₄₆₋₁₆₅ presented by DRB1*11:01. In line with a high immunogenicity of this epitope, Peng et al. ((2020) Nat. Immunol. 21:1336-1345). Interestingly, two of the CD4 T cell specific peptides identified in this study (S₇₁₄₋₇₂₈ and N₂₂₁₋₂₄₂) were mutated in the SARS-CoV-2 B1.1.7 variant first identified in Britain (Rambaut, A., Loman, N. & Volz, E. (2020 COVID-19 Genomics Consortium UK). Reporter cells were transduced with MCR2 carrying the WT and mutated S₇₁₄₋₇₂₈ or N₂₂₁₋₂₄₂ peptides (FIG. 37E), and it was discovered that S_{714-728 (T716I)} was not recognized by the TCR₀₀₇ (FIG. 37F). Recognition of the N₂₂₁₋₂₄₂ peptide was unaffected by the mutation, suggesting that Ser236 was not part of the minimal epitope (FIG. 37F), nor did it affect peptide presentation.

[0686] MEDi Indicates Efficient Presentation of Immunogenic CD4 T Cell Epitopes

[0687] Next, the presentability of the CD4 T cell targets identified in the MCR screens was analyzed. MEDi data indicated good presentability of the TCR091 target peptide region by DRB1*11:01 (FIG. 38C and FIG. 44). Furthermore, consistent with high reactivity among patients, MEDi suggested presentation of this region by other HLA alleles like DRB1*04:04 and DRB1*15:01, and to a lower extent by DRB1*07:01 (FIG. 38). NetMHCIIpan only predicted DRB1*11:01, but the competitive peptide binding assay confirmed the MEDi results: DRB1*11:01 showed the highest IC₅₀ (236 nM-561 nM), followed by DRB1*04:04(1.7-9.5 μM) and DRB1*15:01(3.2-5.4 μM) and the lowest DRB1*07:01 (4.7-14 μM) (FIG. 38C and FIG. 44). Even if these values do not precisely indicate differences in binding affinity, because the competing fluorescent peptides bind the HLAs with different affinity, the results highlight the advantages of MEDi over netMHCIIpan for discovering low-affinity peptide presentation.

[0688] Next, MEDi scores of the other immunogenic peptides found in this study were analyzed, and were compared to netMHCIIpan predictions (FIGS. 38A-B). All of the CD4 T cell immunogenic peptides were found in the MEDi peaks, with S₉₅₅₋₉₇₁ presented by DPA1*02:02/DPB1*05:01 and N₂₂₁₋₂₄₂ presented by DRB1*14:05 being uniquely identified by MEDi. Also, 7 of the 8 peptides passed the MEDi-MA85 threshold. Only S₃₇₂₋₃₉₃ showed a peak with lower MEDi scores, suggesting lower affinity HLA binding. Thus, selecting all immunogenic peptides for screening applications may require an adjustment of the MEDi threshold. Taken together, these results indicate that MEDi selected peptides are enriched for immunogenic epitopes and that MEDi has an advantage over in-silico predictions for MHC class II alleles, where no high-quality mass spec results or other training data are available.

[0689] MEDi Reveals Candidate Immune-Escape Mutants

[0690] Having established the ability of MEDi to determine presentable peptides, MEDi was used to analyze the effects of 25 mutations present in SARS-CoV-2 variant strains expanding across the globe (FIG. 53). MCR2 libraries were generated containing mutation-overlapping 15mer peptides in the context of 8 different HLA alleles and MEDi analysis was performed. As shown in FIG. 39 and FIG. 54, there was a notable HLA-dependent difference in mutant peptide presentability. ORF8 Y73C and spike R2461 mutations abolished peptide presentation by 6/8 and 5/8 HLA alleles, respectively, suggesting the possibility of immune escape of the virus in patients with these alleles. Several other mutated peptides from nucleocapsid, ORF1a and ORF8 were inefficiently presented by DRB1*04:04 and DRB1*04:01 and DPA1*02:02/DPB1*05:01. For some, the molecular mechanism could be envisioned, e.g. mutations 12230T and Y73C disrupted the N-terminal hydrophobic amino acid stretches constituting a binding motif for DRB1*04:04 (Andreatta et al. supra) (FIG. 39A-B). Also, the spike HV69 deletion reduced presentation by DRB1*07:01. The other alleles showed no difference between WT and mutated peptides, with a few exceptions where presentability of mutated peptides was enhanced. In particular, the spike D1118H mutation stabilized binding of several peptides to DRB1*14:05, DRB1*15:01 and DRB1*07:01 and caused a shift in the peptide presentation landscape of DRB1*04:01 (FIGS. 39A and C). In line, the peptide S1111-1130(D1118H) triggered weaker responses in DRB1*04:01 positive patients (Reynolds et al. (2021) Science, Article eabh1282). Similarly, T716I affected the presentation landscape of DRB1*07:01 and abolished T cell reactivity (FIG. 37F). While FACS staining (FIG. 37E) and MEDi-MA scores showed that the 15mer S_{714-728(T716I)} was presented as well as the WT, they also indicated that mutated peptides starting from Asp₇₀₂ to Asn₇₁₀ would be presented substantially better than WT (FIG. 39D). Indeed, the T716I mutation introduced a perfect P9 anchor residue at position 716, complementing residues Tyr₇₀₇/Ser₇₀₈, Ser₇₁₁ and Ala₇₁₃ to form a good DRB1*07:01 binding motif (FIG. 39D and FIG. 36A). Furthermore, the T716I mutation introduced additional DRB1*07:01-binding motifs potentially allowing three different presentation registers for peptide S_{714-728(T716I)} (FIGS. 39E and F): first, comprising a weak HLA-binding motif starting at Ile714, with Thr₇₁₆ directly facing the TCR; second starting with the mutated Ile₇₁₆ as a new anchor residue; and third, where the T716I mutation would be outside of the minimal epitope for TCR007. Thus, the T716I mutation could abrogate TCR recognition by either of two mechanisms: it could alter peptide presentation on DRB1*07:01, or it could abolish direct TCR007 contacts.

[0691] To answer this question, 12mer peptides S₇₁₄₋₇₂₅, S_{714-725(T716}I) and S₇₁₇₋₇₂₈ were cloned into the DRB1*07:01-MCR2 and cocultured MCR2+reporter cells with TCR007 T cells. As shown in FIG. 39G, all constructs were expressed well with S₇₁₇₋₇₂₈ reaching the highest levels indicating best presentation. Intriguingly, TCR007 recognized S₇₁₇₋₇₂₈, but not S₇₁₄₋₇₂₅ (FIG. 39H). This indicates that T716I abrogated TCR recognition of the S₇₁₄₋₇₂₈₁₅mer indirectly.

[0692] These results suggest several mechanisms of peptide presentation modulation and highlight the ability of the MEDi platform to decipher molecular details underlaying possible viral immune escape strategies. Comprehensive analyses of the arising viral mutants, studying the relation of presentability and immunogenicity, will be important for the development of future therapeutics.

[0693] Discussion

[0694] Identifying the specificity of pathogen-reactive lymphocytes is important for the fields of therapeutics and vaccine development. While protection from viral infections is mostly attributed to B cell and CD8 T cell effector functions, the balance between enabling and restricting them decides about life and death of the host. Thus, understanding the CD4 T cell reactivity, which orchestrates these responses, is important, and deep knowledge of epitope presentation by HLA class II would greatly help clinical developments. However, owing to the limited sensitivity of mass spectroscopy and varying accuracy of the in silico methods, it is difficult to generate peptide presentation landscapes across multiple HLA alleles. MEDi, provides a powerful alternative approach, based on functional cell surface expression of the MCR2 molecules. It is HLA agnostic due to the association of MCR2 with the CD3 chains and allows unbiased, fast, and affordable testing of all antigen-derived peptides for their ability to be presented by an HLA. The results described herein indicate that antigenic peptides usually reside within the MEDi high regions (some missed by prediction algorithms), provide a list of presentable SARS-CoV-2 peptides for several different HLA alleles and describe mechanisms for viral immune evasion. The MEDi results were validated biochemically and biologically, through presentation analysis of immunogenic epitopes discovered by “de-orphaning” TCRs from over a hundred T cells enriched in the lungs of acute COVID-19 patients. Highlighting the importance of CD4 T cells, it was discovered that among the enriched TCRs, 8/47 (17.0%) of the CD4-derived ones and 3/63 (4.7%) of the CD8-derived ones recognized SARS-CoV-2 peptides. The appearance of mutated SARS-CoV-2 with higher transmissibility raises important questions about the selective pressure that gave rise to the fitter variants and the role of immune escape in their evolution. While viral escape from antibody-mediated neutralization has been well documented for many diseases, much less is known about a potential selective pressure to evade T cell reactivity. Understanding HLA presentation and TCR recognition of mutant and WT epitopes is important in this regard. Several mutations present in the emerging SARS-CoV-2 variant strains reduced presentability of the affected peptides by several HLA class II alleles. Furthermore, 2 of the 8 immunogenic peptides found in this study were targeted by the arising mutations. Both mutations were just outside of the minimal epitopes, but one still affected TCR recognition. Two different mechanisms of escape were tested and it was determined that Thri6 was not directly bound by the TCR, but that the T716I mutation altered peptide presentation by enabling binding in a different register. This evasion strategy would affect all T cells recognizing this peptide, so the T716I mutation might provide a bigger advantage for the virus than appreciated so far. Furthermore, given the optimal peptide length for MHC class II being 18-20 amino acids (O'Brien, C. et al. (2008) Immunome Res. 4:6), it is very likely that most peptides, comprising the HLA binding core starting at Phe718, will include Thr/Ile716. A significant advantage of MEDi is that it is easily scalable to the thousands of alleles present in humans and enables peptide presentability studies with patient-specific HLA alleles for which no good training data are available. Consistently, the immunogenic spike S₉₅₅₋₉₆₉ peptide presented by DPA1*02:02/DPB1*05:01 and N₂₂₁₋₂₄₂ presented by DRB1*14:05, both MEDi high, were not well predicted by netMHCIIpan. Furthermore, with MEDi it was possible to provide presentability information for any immunogenic peptide across multiple HLA alleles. This is exemplified by the very immunogenic membrane protein peptide M₁₄₆₋₁₆₅, recognized by TCR091 in the context of DRB1*11:01 and shown by MEDi to be also presentable by several other HLAs, not predicted by netMHCIIpan. However, the information gained from MEDi can support further training of predictive models similar to Rappazzo et al. ((2020) Nat. Commun. 11:4414).

[0695] The results presented in this study validate the MEDi platform and provide insights into the molecular mechanisms of SARS-CoV-2 peptide presentation and potential escape from T cell recognition. MEDi should help closing the gap in peptide-presentation landscape for thousands of HLA alleles and be useful for the development of novel therapeutical approaches beyond prevention of COVID-19 or treatment of SARS-CoV-2 patients.

### Example 22: Allelic Variation in Class I HLA Determines Pre-Existing Memory Responses to SARS-CoV-2 that Shape the CD8⁺ T Cell Repertoire Upon Subsequent Viral Exposure

[0696] Effective presentation of antigens by HLA class I molecules to CD8⁺ T cells is required for viral elimination and generation of long-term immunological memory. In this study, a single-cell, multi-omic technology was applied to generate the first unified ex vivo characterization of the CD8⁺ T cell response to SARS-CoV-2 across 4 major HLA class I alleles. It was found that HLA genotype conditions key features of epitope specificity, TCR a/b sequence diversity, and the utilization of pre-existing SARS-CoV-2 reactive T cell memory pools. Single-cell transcriptomics revealed functionally diverse T cell phenotypes associated with both disease stage and epitope specificity. The results described herein show that HLA variations influence pre-existing immunity to SARS-CoV-2 and shape the immune repertoire upon subsequent viral exposure.

### Introduction

[0697] Elicitation of a robust and durable neutralizing antibody response following immunization of large sections of the population with approved SARS-CoV-2 vaccines is limiting viral transmission and decreasing mortality, providing hope that the global threat from the COVID-19 pandemic is diminishing. However, the appearance of new emerging viral variants warrants continued vigilance. A more complete understanding of the underlying cellular mechanisms that regulate host immunity and guarantee long term protection is required. Infection with SARS-CoV-2 leads to an upper respiratory tract infection, which can be benign or even asymptomatic. If not controlled by the immune response, it can evolve into a lethal pneumonia with immunopathology due to excessive amplification of the innate inflammatory response, complicated by several extra-respiratory manifestations (Huang et al. (2020) Lancet 395:497-506). While humoral responses play an important role in immunological control of infection, the generation of effective cellular immunity and expansion of cytotoxic CD8⁺ memory T cells is also required to eliminate virally infected cells (Sette and Crotty (2021) Cell 184:861-880) as shown from the earlier SARS-CoV-1 epidemic, even in the absence of seroconversion (Ng et al. (2016) Vaccine 34:2008-2014; Seow et al. (2020) Nat Microbiol 5:1598-1607; Rydyznski Moderbacher et al. (2020) Cell 183:996-1012 e1019).

[0698] Several recent studies have focused on the discovery of relevant SARS-CoV-2 epitopes in both CD4⁺ and CD8⁺ responses, leveraging in silico predictions, stimulation/expansion with peptide pools (Peng et al. (2020) Nat Immunol 21:1336-1345; Braun et al. (2020) Nature 587:270-274; Nelde et al. (2021) Nat Immunol 22:74-85; Sekine et a1. (2020) Cell 183:158-168 e114; Schulien et al. (2021) Nat Med 27:78-85; Mateus et al. (2020) Science 370:89-94; Ferretti et al. (2020) Immunity 53:1095-1107 e1093), and tetramer binding (Kared et al. (2020) bioRxiv; Saini et al (2020) bioRxiv). Collectively, these studies identified a number of immunodominant epitopes derived across the viral proteome including structural and non-structural proteins (Braun et al. (2020) Nature 587:270-274; Nelde et al. (2021) Nat Immunol 22:74-85; Sekine et al. (2020) Cell 183:158-168 e114; Schulien et al. (2021) Nat Med 27:78-85; Mateus et al. (2020) Science 370:89-94; Grifoni et al. (2020) Cell 181:1489-1501 e1415; Weiskopf et al. (2020) Sci Immunol 5; Snyder et al. (2020) medRxiv). Interestingly, some of these specificities were also detected in uninfected individuals, suggesting potential cross-reactivity from endemic human coronaviruses (HCoV) to which the population is routinely exposed (Gorse, G. B. et al. (2010) Clin Vaccine Immunol 17:1875-1880), though a direct connection to pre-existing memory cells has not been established.

[0699] The breadth and nature of the cellular immune response to SARS-CoV-2 infection is driven by diversity in both TCR repertoire and human leukocyte antigen (HLA) genetics. Mammalian cells express up to six different HLA class I alleles that shape antigen presentation in disease, and allelic diversity has been associated with both disease susceptibility and outcome of viral infections (MacDonald et al. (2020) J Infect Dis 181:1581-1589; Ochoa et al. (2020) Vivol J17:128). There are divergent reports regarding HLA polymorphism and COVID-19 incidence and severity although the major GWAS studies clearly show no dominant effect of the locus (Severe Covid GWAS Group (2020) N Engl J Med 383:1522-1534; Pairo-Castineira et al. (2021) Nature 591:92-98; Habel et al. (2020) Proc Natl Acad Sci USA 117:24384-24391; Shkurnikov et al. (2021) Front Immunol 12:641900; Nguyen et al. (2020) J Vivol 94: e00510-20). Together with genetic influences on HLA-associated antigen presentation, the clonal selection of T cell receptors (TCRs) that compose an individual's repertoire contributes to the nature and dynamics of the antiviral response, including cellular cytotoxicity and memory formation. Interestingly, despite a potential TCR diversity of 10¹⁵ (Qi et al. (2014) Proc Natl Acad Sci USA 111:13139-13144), several studies have described “public” T cell responses in COVID-19, where complementary determining region (CDR) sequences are conserved within and across individuals (Snyder et al. (2020) medRxiv). The extent to which TCR diversity, especially in the context of epitope specificity restricted to HLA, contributes to response is not well understood.

[0700] Here, a unique technology was used to elucidate, at the single-cell resolution, the connection between T cell specificity, HLA variation, conserved features of paired a/b TCR repertoires, and cellular phenotype observed in CD8⁺ T cell responses to SARS-CoV-2 infection. 108,078,030 CD8+ T cells ex vivo were profiled across 76 acute, convalescent, or unexposed individuals and identified T cell specificity to 648 epitopes presented by four HLA alleles across the SARS-CoV-2 proteome, few of which are implicated by the current variants of concern. Epitope-specific TCR repertoires were surprisingly public in nature, though a high degree of pre-existing immunity associated with a clonally diverse response to HLA-B*07:02 was found, which can efficiently present homologous epitopes from SARS-CoV-2 and HCoVs. Transcriptomic analysis and functional validation were used to confirm a central memory phenotype and TCR cross-reactivity in unexposed individuals with HLA-B*07:02. The data provided in this Example suggests a strong association between HLA genotype and the CD8+ T cell response to SARS-CoV-2, which may have important implications for understanding herd immunity and elements of vaccine design that are likely to confer long-term immunity to protect against SARS-CoV-2 variants and related viral pathogens.

### Materials and Methods

[0701] Antigen library design. Antigenic peptide libraries were made by scoring all possible 9mer peptides derived from the entire SARS-CoV-2 (NC_045512.2) proteome using netMHC-4.0 (29) in the HLA-A*02:01, HLA-A*01:01, HLA-A*24:02 or HLA-B*07:02 alleles. SARS-CoV-1 peptides that had evidence of T cell positive assays, obtained from the Immune Epitope Database and Oh et al. (2011) J Virol 85:10464-10471, and that were highly homologous to their SARS-CoV-2 counterparts within Hamming-distance of 2 were converted to 9-mers. Additionally, SARS-CoV-2 peptides predicted to raise immunogenic responses by others were also included (Campbell et al. (2020) bioRxiv; Grifoni et al. (2020) Cell Host Microbe 27:671-680 e672). Finally, libraries included a set of well-defined viral epitopes from Cytomegalovirus, Epstein-Barr virus, and Influenza viruses (CEF peptide pool) that elicit T cell responses in the population at large. Antigenic peptides with 500 nM affinity or lower were then selected.

[0702] Production of tetramer library pools. HLA-A*01:01, -A*02:01, -A*24:02 and HLA-B*07:02 extracellular domains were expressed in E. coli and refolded along with beta-2-microglobulin and UV-labile place-holder peptides STAPGJLEY (SEQ ID NO: 16), KILGFVFJV (SEQ ID NO: 15), VYGJVRACL (SEQ ID NO: 11) and AARGJTLAM (SEQ ID NO: 14), respectively (Altman and Davis (2016) Curr Protoc Immunol 115:171311-171344). The MHC monomer was then purified by size exclusion chromatography (SEC). MHC tetramers were produced by mixing alkylated MHC monomers and azidylated streptavidin in 0.5 mM copper sulfate, 2.5 mM BTTAA and 5 mM ascorbic acid for up to 4 h on ice, followed by purification of highly multimeric fractions by SEC. Individual peptide exchange reactions containing 500 nM MHC tetramer and 60 uM peptide were exposed to long-wave UV (366 nm) at a distance of 2-5 cm for 30 min at 4° C., followed by 30 min incubation at 30° C. A biotinylated oligonucleotide barcode (Integrated DNA Technologies) was added to each individual reaction followed by 30 minute incubation at 4° C. Individual tetramer reactions were then pooled and concentrated using 30 kDa molecular weight cut-off centrifugal filter units (Amicon).

[0703] Cell Staining. Peripheral blood mononuclear cells (PBMCs) from convalescent COVID-19 positive donors or unexposed donors were obtained from Precision 4 Medicine (USA), the Massachusetts Consortium on Pathogen Readiness (MassCPR), or CTL (USA), all under appropriate informed consent. PBMCs were thawed, and CD8+ T cells were enriched by magnetic-activated cell sorting (MACS) using a CD8+ T cell Isolation Kit (Miltenyi) following the manufacturers protocol. The CD8+ T cells were then stained with 1 nM final concentration tetramer library in the presence of 2 mg/mL salmon sperm DNA in PBS with 0.5% BSA solution for 20 minutes. Cells were then labeled with anti-TCR ADT (IP26, Biolegend) for 15 minutes followed by washing. Tetramer bound cells were then labeled with PE conjugated anti-Flag antibody (BioLegend) followed by dead cell discrimination using 7-amino-actinomycin D (7-AAD). The live, tetramer positive cells were sorted using a Sony MA900 Sorter (Sony).

[0704] Single-cell Sequencing. Tetramer positive cells were counted by Nexcelom Cellometer (Lawrence, Mass., USA) using AOPI stain following manufacturer's recommended conditions. Single-cell encapsulations were generated utilizing 5′ v1 Gem beads from 10× Genomics (Pleasanton, Calif., USA) on a 10× Chromium controller and downstream TCR, and Surface marker libraries were made following manufacturer recommended conditions. All libraries were quantified on a BioRad CFX 384 (Hercules, Calif., USA) using Kapa Biosystems (Wilmington, Mass., USA) library quantified kits and pooled at an equimolar ratio. TCRs, surface markers, and tetramer generated libraries were sequenced on Illumina (San Diego, Calif., USA) NextSeq550 instruments. Sequencing data were processed using the Cell Ranger Software Suite (Version 3). Samples were demultiplexed and unique molecular identifier (UMI) counts were quantified for TCRs, tetramers, and gene expression.

[0705] Single-cell Transcriptomic Analysis. Hydrogel-based RNA-seq data were analyzed using the Cell Ranger package from 10× Genomics (v3.1.0) with the GRCh38 human expression reference (v3.0.0). Except where noted, Scanpy (v1.6.0,(52)) was used to perform the subsequent single cell analyses. Any exogenous control cells identified by TCR clonotype were removed before further gene expression processing. Hydrogels that contain UMIs for less than 300 genes were excluded. Genes that were detected in less than 3 cells were also excluded from further analysis. Several additional quality control thresholds were also enforced. To remove data generated from cells likely to be damaged, upper thresholds were set for percent UMIs arising from mitochondrial genes (13%). To exclude data likely arising from multiple cells captured in a single drop, upper thresholds were set for total UMI counts based on individual distributions from each encapsulation (from 1500 to 3000 UMIs). A lower threshold of 10% was set for UMIs arising from ribosomal protein genes. Finally, an upper threshold of 5% of UMIs was set for the MALAT1 gene. Any hydrogel outside of any of the thresholds was omitted from further analysis. A total of 15,683 hydrogels were carried forward. Gene expression data were normalized to counts per 10,000 UMIs per cell (CP10K) followed by log 1p transformation: ln(CP10K+1).

[0706] Highly variable genes were identified (1,567) and scaled to have a mean of zero and unit variance. They were then provided to scanorama (v1.7) (Hie et al. (2019) Nat Biotechnol 37:685-691) to perform batch integration and dimension reduction. These data were used to generate the nearest neighbor graph which was in turn used to generate a UMAP representation that was used for Leiden clustering. The hydrogel data (not scaled to mean zero, unit variance, and before extraction of highly variable genes) were labeled with cluster membership and provided to SingleR (v1.4.0) (Aran et al. (2019) Nat Immunol 20:163-172) using the following references from Celldex (v1.0.0) (Aran et al. (2019) Nat Immunol 20:163-172), Monaco Immune Data, Database Immune Cell Expression Data, and Blueprint Encode Data. SingleR was used to annotate the clusters with their best-fit match from the cell types in the references. Clusters that yielded cell types other than types of the T cell lineage were removed from consideration and the process was repeated starting from the batch integration step. The best-fit annotations from SingleR after the second round of clustering and annotation were assigned as putative labels for each Leiden cluster. Further clustering of transcriptomic data was performed across the genes shown in FIG. 5 using KMeans in sklearn (v0.24) with n_clusters set to 8. As the method has a preference to assign like-sized clusters, further consolidation of two central memory clusters was performed.

[0707] In order to provide corroboration for the SingleR best-fit annotations and further evidence as to the phenotype of the clusters, gene panels representing functional categories (Naïve, Effector, Memory, Exhaustion, Proliferation) were used to score each hydrogel's expression profiles using scanpy's “score_genes” function (Wolf et al. (2018) Genome Biol 19:15), which compares the mean expression values of the target gene set against a larger set of randomly chosen genes that represent background expression levels. The gene panels for each class were: Naïve—TCF7, LEF1, CCR7; Effector—GZMB, PRF1, GNLY; Memory—AQP3, CD69, GZMK; Exhaustion—PDCD1, TIGIT, LAG3; Proliferation—MKI67, TYMS. The gene expression matrix for all hydrogels were first imputed using the MAGIC algorithm (v2.0.4) (van Dijk et al. (2018) Cell 174:716-729 e727). These functional scores were the only data generated from imputed expression values.

[0708] Scoring pMHC-TCR interactions. Tetramer data analysis was performed using Python (v3.7.3). For each single-cell encapsulation, tetramer UMI counts (columns) were matrixed by cell (rows) and log-transformed. Duplicates of this matrix were independently Z-score transformed by row or column, and subsequently median-centered by the opposite axis (column or row), respectively. For each pMHC-cell interaction, this provided two scores—inter-tetramer (Sₜₑₜ) and inter-cell (S_{cell}), which were used to calculate a classifier for unique CDR3 a/b clonotypes across N cells as N*Sₜₑₜ*Sₚₑₗₗ. A classifier threshold of 40 for positive interactions.

[0709] TCR Network Analysis. TCR motif analysis was performed using scirpy (v0.6.1) with receptor_arms=“any,” metric=“alignment,” and default cutoff of 10. Once clusters were identified, sequence alignment was performed using the pairwise2 module in Biopython (v1.78) and visualized using logomaker (v0.8).

[0710] Recombinant TCR validation. Recombinant TCRs identified from patient samples were ordered from TWIST Biosciences in the pLVX-EF1a lentiviral backbone (Takara) as a bicistronic TCRb-T2A-TCRa vector. Viral supernatants from transfected HEK 293 T cells were collected 48 and 72 hours after transfection and added to the parental TCRab^{-/-} Jurkat J76 cell like (Jutz et al. (2016) J Immunol Methods 430:10-20) expressing CD8 and an NFAT-GFP reporter, referred to as J76-CD8-NFAT-GFP. Recombinant TCR surface expression was confirmed through flow cytometry by staining transduced J76-CD8-NFAT-GFP cells with anti-CD3-PE (Clone UCHT1) and anti-TCRab-APC (Clone IP26) antibodies.

[0711] To assess functional activity of recombinant TCRs, J76-CD8-NFAT-GFP expressing recombinant TCRs were incubated at a 1:1 ratio with the HLA-A*02:0 rand HLA-B*07:02⁺HCC 1428 BL (ATCC CRL-2327) lymphoblastic cell line, with a final concentration of 0.5% DMSO (vehicle) or 50 mM of cognate peptide (New England Peptide, >95% pure). Cell mixtures were incubated in the Sartorius IncuCyte at 37° C., 5% CO2 overnight and analyzed for NFAT-GFP expression measured as total integrated intensity (GCU×um²/image) at 12 hours after assay setup. At 16 hours, cells were removed from the IncuCyte and subsequently washed and blocked with BD Staining Buffer (BD 554656), stained with anti-CD3-PE-Cy7 (Clone UCHT1) and anti-CD69-APC (Clone FN50) antibodies, and analyzed using the Intellicyt iQue Screener Plus and FlowJo v10. CD69 activity was measured as percent positive of CD3⁺ cells.

### Results

[0712] Direct ex-vivo detection and decoding of SARS-CoV-2-specific CD8+ T cells: Single-cell RNA sequencing with DNA-encoded peptide-HLA tetramers was used to characterize CD8⁺ T cell responses to SARS-CoV-2 across multiple Class I alleles in subjects with varying degrees of disease severity. The technology illustrated in FIG. 45A simultaneously determines the specificity of paired a/b TCR sequences for HLA-restricted epitopes and provides transcriptomic phenotype at single-cell resolution. Peptide-HLA tetramer libraries were created to ensure comprehensive coverage of SARS-CoV-2 and related betacoronaviruses across four class I HLA alleles prevalent in North America (A*02:01, B*07:02, A*01:01, and A*24:02, hereafter A*02, B*07, A*01, and A*24). Library inclusion was determined computationally using predicted HLA binding (NetMHC-4.0)(Andreatta et al. (2016) Bioinformatics 32:511-517) of candidate peptides from a set of all possible 9-mers from the SARS-CoV-2 proteome (40% from structural, 60% from non-structural proteins), potentially immunogenic neopeptides from known SARS-CoV-2 variants, and immunogenic epitopes from SARS-CoV-1. A total of 1,355 SARS-CoV-2 related epitopes were included in the libraries in addition to well-characterized epitopes from common endemic viruses (CMV, EBV, and influenza).

[0713] The peptide-HLA tetramer libraries were used to interrogate PBMCs from individuals who had been infected with SARS-CoV-2 (N=28 convalescent, N=27 with acute disease that required hospitalization), or who were unexposed (N=23). For each sample, CD8⁺ cells were isolated from PBMCs, incubated with HLA-matched tetramer libraries, and sorted by flow cytometry to enrich viable, tetramer positive cells. Sorted single cells were encapsulated with DNA-encoded hydrogel beads to provide cell-specific barcodes and unique molecular identifiers (UMIs) that could be used to unify reads across independent sequencing libraries for TCR, peptide-HLA tetramer, and mRNA (FIG. 45A). The specificity of TCRs was determined using a classification method that identified UMI counts for TCR-peptide-HLA interactions that were outliers when Z-score transformed within and across cells for each sample. The resulting classifier was evaluated against functional assay data for each allele by receiver-operator curve (ROC) analysis to identify thresholds, which were then used for normalization. The normalized classifier evaluated by ROC analysis provided an area under the curve (AUC) of 0.82 (FIG. 50), and at a threshold of 1, which was applied to the entire data set, yielded a true positive rate of 93% and a false positive rate of 32%.

[0714] From the 55,956,215 CD8⁺ cells interrogated from acute and convalescent COVID-19 patients, high-confidence TCR-peptide-HLA interactions were identified across 434 immunogenic SARS-CoV-2-derived epitopes and 1,163 independent a/b TCR clonotypes (FIG. 45B). The immunodominant epitopes discovered ex vivo were consistent with those measured by other means, but many epitopes were identified with less dominant representation (yet observed with two or more reactive clonotypes), 188 of which had not been previously reported as minimal epitopes. Importantly, specificity to SARS-CoV-2 antigens was observed across the entire proteome, generally distributed in a manner consistent with protein lengths, as summarized below in TABLE 13:

TABLE 13

| Antigen | A*01:01 | A*02:01 | A*24:02 | B*07:02 | Summary |
|---|---|---|---|---|---|
| SARS2_ORF1AB | 51 | 419 | 77 | 26 | 573 |
| SARS2_SPIKE | 11 | 158 | 46 | 6 | 221 |
| SARS2_N | — | 45 | — | 72 | 117 |
| SARS2_3A | 6 | 73 | 6 | 1 | 86 |
| SARS2_M | 6 | 24 | 11 | 2 | 43 |
| SARS2_7A | — | 12 | — | 1 | 13 |
| SARS2_E | 2 | 10 | — | — | 12 |
| SARS2_9B | — | 9 | — | — | 9 |
| SARS2_10 | — | 6 | 1 | — | 7 |
| SARS2_14 | — | 6 | — | — | 6 |
| SARS2_7B | — | 5 | — | — | 5 |
| SARS2_8 | — | 5 | — | — | 5 |
| SARS2_6 | 1 | 3 | — | — | 4 |

[0715] Of relevance, 85 of these epitopes were derived from the Spike protein currently used in vaccines, but only six of them (a total of 20 CD8⁺ T cell clonotypes in the study) would be affected by the recent SARS-CoV-2 variants (B.1.1.7, B.1.351, P.1).

[0716] Dimensionality reduced projections of mRNA expression for 224,780 CD8⁺ T cells revealed the broad phenotypic variance observed within this study, spread across 8 clusters (FIG. 45C). The phenotypic features of clusters were determined using gene signatures generally associated with various CD8⁺ T cell states, including those with naïve, memory, effector, and proliferative status (FIG. 45C). In this space, cells from convalescent patients that recognized different dominant epitopes were commonly associated with divergent phenotypes, as shown for representative epitopes in FIG. 45D. For example, T cells specific to QYIKWPWYI (SEQ ID NO: 318) in A*24 (QYI-A24) were clustered in regions with high effector scores while those specific for PTDNYITTY (SEQ ID NO: 327) in A*01 (PTD-A01) and LLYDANYFL (SEQ ID NO: 286) in A*02 (LLY-A02) resided at opposite ends of memory-rich regions. Thus, and as will be further detailed below, the different immunoreactive epitopes of SARS-CoV-2 elicit distinct CD8⁺ T cell phenotypes.

[0717] Evolution of immunoreactivity through COVID-19 disease progression: Having established a broad landscape of SARS-CoV-2-reactive CD8⁺ T cells, a study was designed to determine how TCR repertoires evolve over the course of infection and recovery. As this approach does not require cell expansion to determine TCR specificity, it was possible to directly quantify the frequency of epitope-specific CD8⁺ T cells in the blood of convalescent, acute, and unexposed individuals. FIG. 46A shows the frequency, for each subject, of T cells reactive to the top five epitopes detected across each of the four HLA variants analyzed. Notably, markedly fewer SARS-CoV-2-specific T cells were observed in patients with acute disease compared to those in convalescence (p=6.0e-5 for A*02, Wilcoxon rank sum); dramatic reduction also applied to memory T cells from prior antiviral responses in these patients, including influenza and EBV, but potentially less to the CMV-specific pool in multiple acute subjects (FIG. 51). The paucity of virus reactive T cells is consistent with the severe T cell lymphopenia that has previously been reported to occur in patients with acute COVID-19 (Huang et al. (2020) Lancet 395:497-506; Chen et al. (2020) J Clin Invest 130:2620-2629).

[0718] The frequencies of SARS-CoV-2-specific T cells in unexposed individuals varied markedly with the HLA allele (FIG. 46A). While several dominant epitopes in HLA-A*02, A*24, and A*01 were associated with high-frequency responses in >40% of convalescent subjects (FIG. 46B) the depth of the overall response was significantly lower in unexposed compared to convalescent subjects (p=2.3e-5, 2.2e-4, 1.1e-6 by by Wolcoxon rank sum, respectively). In stark contrast, there was no discernible difference in response frequency detected across the most immunodominant epitopes in B*07:02 indivisuals (p=0.2). In fact, CD8⁺ T cells recognizing nucleocapsid-derived SPRWYFYYL (SEQ ID NO: 323) in B*07 (SPR-B07) were found in almost over 80% of unexposed subjects with a mean frequency of 4 cells/M cells screened (FIG. 46B), presaging the immunodominance of this epitope in convalescent COVID-19 patients, where reactivity was detected in >100% of the samples.

[0719] The broad presence of SARS-CoV-2-specific T cells in unexposed B*07 subjects could originate from fortuitous cross-reactivity of a public specificity, or from priming via previous exposure to a highly related endemic human coronavirus (HCoV). Indeed, SPR-B07 shows marked homology to the corresponding segments of the nucleocapsid proteins from multiple prevalent HCoVs, including HKU1 and OC43, with only a single amino acid residue mismatched at the N-terminus (FIG. 46C). The nature of the homology preserves internal TCR-contact residues as well as the P and L anchors for HLA binding in peptide positions 2 and 9. Accordingly, the HCoV epitope (LPR-B07) is predicted to bind with high affinity to HLA-B*07 and could reasonably be expected to cross-react with SPR-B07-specific TCRs. Broader sequence alignment with HCoVs revealed very little homology to the immunodominant epitopes of A*02 and A*01, but did identify a perfect match to VYIGDPAQL (SEQ ID NO: 317) for A*24 (VYI-A24). Surprisingly, T cell specificity to VYI-A24 was not detected in a single unexposed subject. This likely reflects the lower frequency of response elicited by this epitope or an insufficient commitment to memory following exposure to HCoVs. Overall, it was found that the response to SARS-CoV-2 is sharply distinguished by HLA genotype, as can be seen clearly in the case of A*02 and B*07, where it appears that highly specific CD8⁺ responses are either generated de novo or amplified from an abundant pre-existing pool, respectively.

[0720] Functional reactivity and cross-reactivity of SARS-CoV-2-specific clonotypes: To confirm the specificity and functionality of TCR-peptide-HLA interactions identified in this study, several of the discovered a/b TCRs clonotypes were cloned and expressed in a TCR-null Jurkat J76 cell line (Jutz et al. (2016) J Immunol Methods 430:10-20). Activation of these transductants upon stimulation by SARS-CoV-2 peptides, presented by an HLA-matched lymphoblast T cell line, was evaluated by measuring the induction of surface CD69 (FIG. 47A). Altogether, 28 interactions were observed for epitopes derived from Orflab, Spike, Nucleocapsid, Membrane, and ORF3a proteins, spanning high confidence interactions observed across multiple cells as well as interactions observed exclusively in a single cell. Dose-response curves for a subset of interactions in A*02 and B*07 are shown in FIG. 47B. The EC50s measured for these interactions ranged from 1 to 100 nM, with no particular relationship to epitope immunodominance or clonotype frequency measured ex vivo from the respective subject. These values are consistent with interactions measured for CMV-specific epitopes in A*02 using the same system. The recombinant TCR expressing rTCR cell lines were used to compare the functional reactivity elicited by homologous epitopes from HCoVs (FIG. 47C). Activation was insignificant for the closest homologs of Orf3a-derived LLY-A02 and Orflab-derived ALW-A02, all of which actually originated from HCoV spike proteins. In contrast, HKU1 and OC43 homologs of nucleocapsid-derived SPR-B07 and KPR-B07 epitopes drove substantial T cell activation (FIG. 47C).

[0721] The sensitivity of B*07 interactions was assessed, comparing the reactivity of SPR-B07-specific clonotypes identified from COVID-19 patients or unexposed subjects to SARS-CoV-2-derived SPR-B07 or HCoV-derived LPR-B07 (FIG. 47D). The three TCRs identified from COVID-19 individuals yielded EC50s that were essentially identical for the two epitopes, all falling between 50-100 nM (FIG. 47D, left). Two of the TCRs from unexposed individuals yielded EC50s in the same range, again comparable for the HCoV and SARS-CoV-2 variants, while a third showed a >10-fold preference for the HCoV epitope (even though it was originally detected as binding to the SARS-CoV-2 peptide). Aside from providing validation that the specificities detected in the barcoded tetramer technology indeed correspond to antigen-reactive T cells, these findings support that the homologies between SARS-CoV-2 and HCoV epitopes are functionally relevant, and that pre-existing cellular reactivity to SARS-CoV-2 in B*07 subjects likely results from previous exposure to HCoVs like HKU1 or OC43.

[0722] HLA Restricted Epitopes Impact V(D)J Gene Usage: Given the comprehensive landscape of TCR specificity determined with this approach, a study was designed to elucidate the extent to which TCR usage is shared within and across subjects. The linkage between paired TCR α/β sequences and their epitope specificity was examined to determine if any features are implicated in the CD8⁺ T cell response to SARS-CoV-2. TCRs from 2,469 SARS-CoV-2-specific T cells were used to perform network mapping of epitope-specific subsets across several immunodominant epitopes identified (FIG. 48A). Importantly, because it is known that during development a TCR β-chain can be paired with many different α-chains, the network analysis allowed clonotype linkages with α or β CDR3 sequences (indicated by edges), identifying conserved motifs based on physicochemical similarity (via BLOSUM matrices) within in the epitope specific T cell population (Dash et al. (2017) Nature 547:89-93). T cells from COVID-19 patients that recognize the most dominant A*02-, A*24-, and A*01-restricted epitopes, which have no counterpart in unexposed repertoires, showed a high degree of motif sharing with the exception of KLW-A02 (FIG. 48A). Interestingly, all of these epitopes, including KLW-A02, show dominant usage of a single TCR alpha variable (TRAV) region, and in the cases of QYI-A24 and PTD-A01, dominant usage both TRAV and TCR beta variable (TRBV) regions (FIG. 48B). In marked contrast, SPR-B07-specific T cells, including those that also recognize homologs from HCoV, were far more diverse in CDR3 across subjects (FIG. 48A), also using 8 TRAV and 3 TRBV regions to cover 50% of the clonotypes represented. Interestingly, two instances of CDR3 homology shared across cohorts was observed, as indicated by the presence of nodes with unconnected edges, which are represented in both network maps.

[0723] These comparisons show that the reactivities that appear during SARS-CoV-2 infection may stem from both the amplification of highly related TCRs, or from the usage of diverse pre-existing T cell populations. This conclusion extended to CDR3 lengths (FIG. 48C), which were tightly distributed for a and/or β-chains in T cells reactive to the top epitopes in A*02, A*24, and A*01, but significantly less so for SPR-B07. To further understand the extent of the public nature of paired a/(3 TCR usage in COVID-19, consensus sequences were generated from select interconnected network clusters (FIG. 48D). This representation provides insight into a/b linkage in the context of public responses, that cannot be afforded by bulk sequencing approaches. Most motifs were represented by multiple sequences and shared by 50% or of the subjects studied, with the exception of KLW-A02 that was shared across only 22%, and SPR-B07 that was shared across only 14%, notably with identical α/β sequences (FIG. 48D). Thus, divergent TCR repertoire utilization, conditioned by HLA and the presence of diverse, pre-existing reactivity resulting from prior viral exposure was observed.

[0724] CD8+ Memory T cell Phenotypes vary with recognition of SARS-CoV-2 epitopes in COVID-19: To examine how CD8+ T cell phenotype varied in relation to disease status, HLA epitope specificity, and TCR diversity, a more detailed analysis of the single-cell transcriptomic data was performed. As an internal reference, the transcriptomic phenotype of T cells reactive to common acute and latent infections, including influenza, EBV, and CMV was used. To relate these data to existing knowledge on differentially-expressed genes that delineate CD8⁺ T subsets, supervised partition clustering based on imputed expression of a set of 51 curated transcripts characteristic of naïve, memory, effector, or chronically-activated/exhausted populations was used (FIG. 49A and FIG. 52). This resulted in the identification of seven distinct T cell clusters. Some were easily assigned (naïve cells in C1, central memory in C2, and fully activated cytotoxic effectors in C7). Other memory/effector intermediates were more tentatively labeled, as they did not easily fit into existing categorizations (Szabo et al. (2019) Nat Commun 10:4706; Monaco et al. (2019) Cell Rep 26:1627-1640 e1627). These included a puzzling population (C3, here “CD127+ Memory”), which expresses markers of naïve, memory and effector cells, and 3 other clusters with characteristics of memory or chronically activated cells (C4-6).

[0725] SARS-CoV-2 specific T cells were found in all clusters (FIG. 49B, bottom), but at proportions that varied with stage of disease and epitope specificity. Cells from acute patients predominantly showed full effector phenotypes, but also paradoxically naïve types. In convalescent donors, T cells from several epitope specificities were broadly distributed, consistent with the resolution of an infection. Several, epitope-specific T cell pools were predominantly found in central memory (C2), including PTD-A01 (49%) and LLY-A02 (42%), while others predominantly resided in cytotoxic terminal effector (C7) including TLM-A02 (80%), and LLL-A02 (61%). In most other reactivities, including SPR-B07, transcriptional profiles in convalescent patients were fairly broadly distributed across all clusters. In contrast, the reactivity in unexposed subjects was dominated by the central memory pool, confirming that the CD8+ cells likely result from long-term exposure to cross-reactive antigens. This was especially clear in the case of B*07, where epitope-specific T cells for SPR-B07, QPG-B07, and SII-B07 were represented in central memory (C2) at proportions of 88%, 75%, and 67%, respectively. Other notable reactivities associated with central memory include TSQ-A24 (70%) and NSS-A01 (68%), though the source of these memory cells, like QPG-B07 and SII-B07, does not appear to be from HCoV exposure based on lack a of homology. Overall, this analysis provides further evidence that SPR-B07 responses to SARS-CoV-2 are likely drawn from a pre-existing memory pool and that commitment to different T cell fate is dependent on epitope specificity.

[0726] Some interesting dynamics were observed between SARS-CoV-2 infection and existing T cell pools specific for common viral infections, with differentiated outcomes likely shaped by exposure history (FIG. 49B). Influenza-specific cells CD8+ T cells, which result from vaccination or past infections, mapped primarily to the central memory (C1) and effector memory (C3) compartments in unexposed individuals. Proportions were stable across epitope specificities in COVID patients with the exception of GIL-A02, where the proportion of effector memory cells decreased from 50% to 0%, and a naïve population representing 30% of the cells paradoxically emerged. CMV- and EBV-specific cells, likely subject to more chronic stimulation from low-level re-activation of these integrated herpesviruses, mapped to more activated pools in unexposed subjects, as has been described by others (van den Berg et al. (2019) Med Microbiol Immunol 208:365-373). After SARS-CoV-2 infection, EBV-specific cells shifted markedly from central memory (C2) and chronically stimulated compartments (C5) into the 127+ memory cluster (C3). These changes may reflect either bystander activation, perhaps as a result of the high cytokine release in COVID-19 patients, or from changes in homing or recirculation patterns that bring into the blood cells normally sequestered in tissues. These observations suggest that, in addition to inducing lymphopenia, COVID-19 strongly reshuffles third-party antiviral T cell pools, the extent of which may be associated with exposure history, and at least to some degree epitope specificity.

### Discussion

[0727] This Example demonstrates a unified description of the CD8⁺ T cell response to SARS-CoV-2, highlighting the importance of HLA genetics, TCR repertoire diversity, and epitope-specific navigation through a complex transcriptomic phenotype at various stages of disease. In building a comprehensive map of immunodominant, HLA-restricted epitopes broadly derived from proteins across the entire SARS-CoV-2 proteome, only some HLA haplotypes are associated with the existence of a pre-existing CD8+ T cell memory pool in unexposed individuals. HLA variation plays an important role in shaping the diversity of CD8⁺ T cell repertoires upon exposure to SARS-CoV-2, and that cellular phenotype and commitment to memory can be associated with epitope-specificity in the context of both SARS-CoV-2 and latent EBV infections.

[0728] The presence of SARS-CoV-2 reactive CD8⁺ T cells has been linked to milder disease (Rydyznski Moderbacher et al. (2020) Cell 183:996-1012 e1019; Sekine et al. (2020) Cell 183:158-168 e114; Schulien et al. (2021) Nat Med 27:78-85), although, the precise link between cellular immunity and host protection still remains to be further understood (Addetia et al. (2020) J Clin Microbiol 58; Fontanet and Cauchemez (2020) Nat Rev Immunol 20:583-584). Individuals carrying HLA-B*07 were found to show a CD8⁺ T cell response that is dominated by pre-existing memory pools reactive to multiple SARS-CoV-2 epitopes, especially SPR-B07, which is likely induced by previous exposures to benign HCoVs. In contrast, the immunodominant responses in A*02 individuals (e.g., to YLQ-A02, LLY-A02) are driven largely by the expansion of antigen-inexperienced SARS-CoV-2-specific T cells. It is possible that CD8⁺ T cell cross reactivity may be less widespread in unexposed individuals than for CD4⁺ T cross-reactivity, for which ˜50% of unexposed individuals exhibited CD4+ T cell memory (Grifoni et al. (2020) Cell 181:1489-1501 e1415). This data provides a basis for this limited representation of the CD8⁺ T cell repertoire in that only a subpopulation of individuals carrying a specific HLA allele would have these pre-existing memory CD8⁺ T cells.

[0729] The interplay between HLA-restricted epitope presentation and available TCR repertoire shapes the cellular response to SARS-CoV-2. There are few limited studies suggesting an influence of HLA genotype on COVID-19 severity (Shkurnikov et al. (2021) Front Immunol 12:641900; Liang et al. (2021) Int J Mol Sci 22:2), an epidemiologic study from Italy reported that HLA-B*44 and HLA-C*01 positive individuals are more susceptible to SARS-CoV-2 when compared with other HLA alleles including HLA-A*25 and HLA-B*08 (Correale et al. (2020) Int J Mol Sci 21:5205). Large-scale, high-resolution HLA mapping, consistent with what was done for select HLAs in this work, may help identify relationships between HLA genotype and protection against severe disease, ideally uncovering mechanism. Here, an interesting connection was observed between TCR repertoire diversity and HLA restriction. Responses seen in A*02, A*24, and A*01 were more often associated with “public” CDR3 motifs and consistent V gene segment usage in α and/or β-chains. In contrast, the dominant immune response in B*07 leveraged a significantly more diverse TCR repertoire.

[0730] The results from this study show that in the case of COVID-19, the largest pool of potentially protective, pre-existing cellular immunity is derived from one of the least public epitope-specific repertoires, possibly reflecting the influence of repeated acute infections with HCoVs throughout the life of the individuals.

[0731] Beyond the comprehensive deciphering of TCR specificity reported here, a detailed picture of the complex and dynamic transcriptional landscape of the CD8⁺ T response to SARS-CoV-2 has been provided. Importantly, it has been demonstrated that the pre-existing SPR-B07 reactivity, observed in ˜80% of unexposed subjects with HLA-B*07, was predominantly associated with a central memory-like transcriptional profile (88%), confirming that it originates from prior exposures. In convalescent patients, it was observed that a much broader distribution of SPR-B07-reactive T cells spanning every functional state at proportions ranging from 5-29%. This is consistent with late contraction/early memory formation described for SARS-CoV-2 in a recent study (Schulien et al. (2021) Nat Med 27:78-85), where cells spanned naïve, central memory, various classifications of effector memory, and terminally differentiated effector memory expressing RA (TEMRA). There was no evidence for a particularly frequent “exhausted” state among SARS-CoV-2-specific CD8+ T cells, as suggested elsewhere (Zheng et al. (2020) Cell Mol Immunol 17:541-543; Diao et al. (2020) Front Immunol 11:827)(acknowledging that the phenotypic state is a proxy for true reactivity testing, and that blood T cells may not fully reflect what happens in the lung). No evidence of “antigenic sin” resulting from HCoV pre-exposure (Brown and Essigmann (2021) mSphere 6:e00056-21) was found that could stifle an effective response to SARS-CoV-2-unexposed B*07 individuals. It will be interesting to determine whether HLA haplotype plays a role in the durability of the CD8+ T cell responses, especially to SARS-CoV-2 vaccines, which may have profound impact for long term protection across different ethnic groups and geographic regions.

[0732] Another interesting observation from this work, is that even at the height of infection or shortly after viral clearance, the cumulative anti-SARS-CoV-2 CD8⁺ T cell response barely reached the frequency of anti-influenza memory responses and was well below the frequencies that could be achieved by CMV-specific cells in the same individuals (FIG. 51). This was particularly evident in the acutely infected individuals, at a time where the contribution of cytotoxic CD8⁺ T cells would have been most important.

[0733] In conclusion, this study leveraged a powerful single-cell technology to better elucidate the roles of HLA variation, TCR diversity, and cellular phenotypes in establishing pre-existing immunity to SARS-CoV-2. The presence of a diverse and immune dominant nucleocapsid epitope-specific memory pool was observed in subjects with HLA-B*07 but little evidence was seen of similar reactivity in individuals with other HLA alleles.

### INCORPORATION BY REFERENCE

[0734] Each patent, publication, and non-patent literature cited in the application, and Obermair et al. (2021) bioRxiv posted Mar. 4, 2021 under doi.org/10.1101/2021.03.02.433522 and Pregibon et al. (2021) bioRxiv posted Apr. 29, 2021 under doi.org/10.1101/2021.04.29.441258, is hereby incorporated by reference in its entirety as if each was incorporated by reference individually.

The application's sequence listing, which the Patent Office published only in electronic form, follows.

SEQUENCE LISTING (1428 sequences)

SEQ ID NO: 1 - protein, 306 aa, Artificial Sequence
  Description of Artificial Sequence: Synthetic polypeptide
  HLA-A2- Sorttag and His6 tag
MSGSHSMRYFFTSVSRPGRGEPRFIAVGYVDDTQFVRFDSDAASQRMEPRAPWIEQEGPEYWDGETRKVKAHSQTHRVDLGTLRGYYNQSEAGSHTVQRMYGCDVGSDWRFLRGYHQYAYDGKDYIALKEDLRSWTAADMAAQTTKHKWEAAHVAEQLRAYLEGTCVEWLRRYLENGKETLQRTDAPKTHMTHHAVSDHEATLRCWALSFYPAEITLTWQRDGEDQTQDTELVETRPAGDGTFQKWAAVVVPSGQEQRYTCHVQHEGLPKPLTLRWEPSSGSGSAGGSGSGGGSLPETGGHHHHHH

SEQ ID NO: 2 - protein, 100 aa, Artificial Sequence [sequence omitted]

SEQ ID NO: 3 - protein, 184 aa, Artificial Sequence
  Description of Artificial Sequence: Synthetic polypeptide
  SAv -Sorttag and His6 tag
MDYKDDDDKGSSGDPSKDSKAQVSAAEAGITGTWYNQLGSTFIVTAGADGALTGTYESAVGNAESRYVLTGRYDSAPATDGSGTALGWTVAWKNNYRNAHSATTWSGQYVGGAEARINTQWLLTSGTTEANAWKSTLVGHDTFTKVKPSAASIDAAKKAGVNNGNPLDAVQQLPETGGHHHHHH

SEQ ID NO: 4 - protein, 398 aa, Artificial Sequence
  Description of Artificial Sequence: Synthetic polypeptide
  HLA-A2-N-intein
MGSHSMRYFFTSVSRPGRGEPRFIAVGYVDDTQFVRFDSDAASQRMEPRAPWIEQEGPEYWDGETRKVKAHSQTHRVDLGTLRGYYNQSEAGSHTVQRMYGCDVGSDWRFLRGYHQYAYDGKDYIALKEDLRSWTAADMAAQTTKHKWEAAHVAEQLRAYLEGTCVEWLRRYLENGKETLQRTDAPKTHMTHHAVSDHEATLRCWALSFYPAEITLTWQRDGEDQTQDTELVETRPAGDGTFQKWAAVVVPSGQEQRYTCHVQHEGLPKPLTLRWEPSSGSGSAGGSFESGPGAEYCLSYETEILTVEYGLLPIGKIVEKRIECTVYSVDNNGNIYTQPVAQWHDRGEQEVFEYCLEDGSLIRATKDHKFMTVDGQMLPIDEIFERELDLMRVDNLPN

SEQ ID NO: 5 - protein, 212 aa, Artificial Sequence
  Description of Artificial Sequence: Synthetic polypeptide
  C-intein-Sav and Flag Tag
MIKIATRKYLGKQNVYDIGVERDHNFALKNGFIASNCFNVDDPSKDSKAQVSAAEAGITGTWYNQLGSTFIVTAGADGALTGTYESAVGNAESRYVLTGRYDSAPATDGSGTALGWTVAWKNNYRNAHSATTWSGQYVGGAEARINTQWLLTSGTTEANAWKSTLVGHDTFTKVKPSAASIDAAKKAGVNNGNPLDAVQQGSTGDYKDDDDK

SEQ ID NO: 6 - protein, 156 aa, Artificial Sequence
  Description of Artificial Sequence: Synthetic polypeptide
  Sortase with His6 tag
MQAKPQIPKDKSKVAGYIEIPDADIKEPVYPGPATREQLNRGVSFAEENESLDDQNISIAGHTFIDRPNYQFTNLKAAKKGSMVYFKVGNETRKYKMTSIRNVKPTAVEVLDEQKGKDKQLTLITCDDYNEETGVWETRKIFVATEVKLEHHHHHH

SEQ ID NO: 7 - protein, 9 aa, Artificial Sequence
  Description of Artificial Sequence: Synthetic peptide
  A02:01 placeholder peptide
  MOD_RES (8)..(8): Ile or Leu
GILGFVFXL

SEQ ID NO: 8 - protein, 9 aa, Artificial Sequence
  Description of Artificial Sequence: Synthetic peptide
  A02:01 binding peptide
NLVPMVATV

SEQ ID NO: 9 - protein, 9 aa, Artificial Sequence
  Description of Artificial Sequence: Synthetic peptide
  A02:01 binding peptide
NLVPMVGTV

SEQ ID NO: 10 - protein, 9 aa, Artificial Sequence
  Description of Artificial Sequence: Synthetic peptide
  A01:01 binding peptide
VTEHDTLLY

SEQ ID NO: 11 - protein, 9 aa, Artificial Sequence
  Description of Artificial Sequence: Synthetic peptide
  A24:02 placeholder peptide
  MOD_RES (4)..(4): Ile or Leu
VYGXVRACL

SEQ ID NO: 12 - protein, 9 aa, Artificial Sequence
  Description of Artificial Sequence: Synthetic peptide
  A24:02 binding peptide
QYDPVAALF

SEQ ID NO: 13 - protein, 11 aa, Artificial Sequence
  Description of Artificial Sequence: Synthetic peptide
  B7:02 binding peptide
RPHERNGFTVL

SEQ ID NO: 14 - protein, 9 aa, Artificial Sequence
  Description of Artificial Sequence: Synthetic peptide
  B7:02 placeholder peptide
  MOD_RES (5)..(5): Ile or Leu
AARGXTLAM

SEQ ID NO: 15 - protein, 9 aa, Artificial Sequence
  Description of Artificial Sequence: Synthetic peptide
  A2:01 placeholder peptide
  MOD_RES (8)..(8): Ile or Leu
KILGFVFXV

SEQ ID NO: 16 - protein, 9 aa, Artificial Sequence
  Description of Artificial Sequence: Synthetic peptide
  A1:01 placeholder peptide
  MOD_RES (6)..(6): Ile or Leu
STAPGXLEY

SEQ ID NO: 17 - protein, 9 aa, Artificial Sequence
  Description of Artificial Sequence: Synthetic peptide
  A3:01 placeholder peptide
  MOD_RES (5)..(5): Ile or Leu
RIYRXGATR

SEQ ID NO: 18 - protein, 9 aa, Artificial Sequence
  Description of Artificial Sequence: Synthetic peptide
  A11:01 placeholder peptide
  MOD_RES (5)..(5): Ile or Leu
RVFAXSFIK

SEQ ID NO: 19 - protein, 9 aa, Artificial Sequence
  Description of Artificial Sequence: Synthetic peptide
  B35:01 placeholder peptide
  MOD_RES (7)..(7): Ile or Leu
KPIVVLXGY

SEQ ID NO: 20 - protein, 10 aa, Artificial Sequence
  Description of Artificial Sequence: Synthetic peptide
  C3:04 placeholder peptide
  MOD_RES (5)..(5): Ile or Leu
FVYGXSKTSL

SEQ ID NO: 21 - protein, 9 aa, Artificial Sequence
  Description of Artificial Sequence: Synthetic peptide
  B8:01 placeholder peptide
  MOD_RES (7)..(7): Ile or Leu
FLRGRAXGL

SEQ ID NO: 22 - protein, 9 aa, Artificial Sequence
  Description of Artificial Sequence: Synthetic peptide
  C7:02 placeholder peptide
  MOD_RES (4)..(4): Ile or Leu
VRIXHLYIL

SEQ ID NO: 23 - protein, 9 aa, Artificial Sequence
  Description of Artificial Sequence: Synthetic peptide
  C4:01 placeholder peptide
  MOD_RES (4)..(4): Ile or Leu
QYDXAVYKL

SEQ ID NO: 24 - protein, 9 aa, Artificial Sequence
  Description of Artificial Sequence: Synthetic peptide
  B15:01 placeholder peptide
  MOD_RES (5)..(5): Ile or Leu
ILGPXGSVY

SEQ ID NO: 25 - protein, 9 aa, Artificial Sequence
  Description of Artificial Sequence: Synthetic peptide
  B40:01 placeholder peptide
  MOD_RES (7)..(7): Ile or Leu
TEADVQXWL

SEQ ID NO: 26 - protein, 9 aa, Artificial Sequence
  Description of Artificial Sequence: Synthetic peptide
  B58:01 placeholder peptide
  MOD_RES (7)..(7): Ile or Leu
ISARGQXLF

SEQ ID NO: 27 - protein, 10 aa, Artificial Sequence
  Description of Artificial Sequence: Synthetic peptide
  C8:01 placeholder peptide
  MOD_RES (4)..(4): Ile or Leu
KAAXDLSHFL

SEQ ID NO: 28 - protein, 365 aa, Homo sapiens
  HLA-A*01:01 full-length
MAVMAPRTLLLLLSGALALTQTWAGSHSMRYFFTSVSRPGRGEPRFIAVGYVDDTQFVRFDSDAASQKMEPRAPWIEQEGPEYWDQETRNMKAHSQTDRANLGTLRGYYNQSEDGSHTIQIMYGCDVGPDGRFLRGYRQDAYDGKDYIALNEDLRSWTAADMAAQITKRKWEAVHAAEQRRVYLEGRCVDGLRRYLENGKETLQRTDPPKTHMTHHPISDHEATLRCWALGFYPAEITLTWQRDGEDQTQDTELVETRPAGDGTFQKWAAVVVPSGEEQRYTCHVQHEGLPKPLTLRWELSSQPTIPIVGIIAGLVLLGAVITGAVVAAVMWRRKSSDRKGGSYTQAASSDSAQGSDVSLTACKV

SEQ ID NO: 29 - protein, 365 aa, Homo sapiens
  HLA-A*03:01 full-length
MAVMAPRTLLLLLSGALALTQTWAGSHSMRYFFTSVSRPGRGEPRFIAVGYVDDTQFVRFDSDAASQRMEPRAPWIEQEGPEYWDQETRNVKAQSQTDRVDLGTLRGYYNQSEAGSHTIQIMYGCDVGSDGRFLRGYRQDAYDGKDYIALNEDLRSWTAADMAAQITKRKWEAAHEAEQLRAYLDGTCVEWLRRYLENGKETLQRTDPPKTHMTHHPISDHEATLRCWALGFYPAEITLTWQRDGEDQTQDTELVETRPAGDGTFQKWAAVVVPSGEEQRYTCHVQHEGLPKPLTLRWELSSQPTIPIVGIIAGLVLLGAVITGAVVAAVMWRRKSSDRKGGSYTQAASSDSAQGSDVSLTACKV

SEQ ID NO: 30 - protein, 365 aa, Homo sapiens
  HLA-A*11:01 full-length
MAVMAPRTLLLLLSGALALTQTWAGSHSMRYFYTSVSRPGRGEPRFIAVGYVDDTQFVRFDSDAASQRMEPRAPWIEQEGPEYWDQETRNVKAQSQTDRVDLGTLRGYYNQSEDGSHTIQIMYGCDVGPDGRFLRGYRQDAYDGKDYIALNEDLRSWTAADMAAQITKRKWEAAHAAEQQRAYLEGRCVEWLRRYLENGKETLQRTDPPKTHMTHHPISDHEATLRCWALGFYPAEITLTWQRDGEDQTQDTELVETRPAGDGTFQKWAAVVVPSGEEQRYTCHVQHEGLPKPLTLRWELSSQPTIPIVGIIAGLVLLGAVITGAVVAAVMWRRKSSDRKGGSYTQAASSDSAQGSDVSLTACKV

SEQ ID NO: 31 - protein, 365 aa, Homo sapiens [sequence omitted]

SEQ ID NO: 32 - protein, 362 aa, Homo sapiens
  HLA-B*07:02 full-length
MLVMAPRTVLLLLSAALALTETWAGSHSMRYFYTSVSRPGRGEPRFISVGYVDDTQFVRFDSDAASPREEPRAPWIEQEGPEYWDRNTQIYKAQAQTDRESLRNLRGYYNQSEAGSHTLQSMYGCDVGPDGRLLRGHDQYAYDGKDYIALNEDLRSWTAADTAAQITQRKWEAAREAEQRRAYLEGECVEWLRRYLENGKDKLERADPPKTHVTHHPISDHEATLRCWALGFYPAEITLTWQRDGEDQTQDTELVETRPAGDRTFQKWAAVVVPSGEEQRYTCHVQHEGLPKPLTLRWEPSSQSTVPIVGIVAGLAVLAVVVIGAVVAAVMCRRKSSGGKGGSYSQAACSDSAQGSDVSLTA

SEQ ID NO: 33 - protein, 366 aa, Homo sapiens
  HLA-C*04:01 full-length
MRVMAPRTLILLLSGALALTETWAGSHSMRYFSTSVSWPGRGEPRFIAVGYVDDTQFVRFDSDAASPRGEPREPWVEQEGPEYWDRETQKYKRQAQADRVNLRKLRGYYNQSEDGSHTLQRMFGCDLGPDGRLLRGYNQFAYDGKDYIALNEDLRSWTAADTAAQITQRKWEAAREAEQRRAYLEGTCVEWLRRYLENGKETLQRAEHPKTHVTHHPVSDHEATLRCWALGFYPAEITLTWQWDGEDQTQDTELVETRPAGDGTFQKWAAVVVPSGEEQRYTCHVQHEGLPEPLTLRWKPSSQPTIPIVGIVAGLAVLAVLAVLGAMVAVVMCRRKSSGGKGGSCSQAASSNSAQGSDESLIACKA

SEQ ID NO: 34 - protein, 366 aa, Homo sapiens
  HLA-C*07:02 full-length
MRVMAPRALLLLLSGGLALTETWACSHSMRYFDTAVSRPGRGEPRFISVGYVDDTQFVRFDSDAASPRGEPRAPWVEQEGPEYWDRETQKYKRQAQADRVSLRNLRGYYNQSEDGSHTLQRMSGCDLGPDGRLLRGYDQSAYDGKDYIALNEDLRSWTAADTAAQITQRKLEAARAAEQLRAYLEGTCVEWLRRYLENGKETLQRAEPPKTHVTHHPLSDHEATLRCWALGFYPAEITLTWQRDGEDQTQDTELVETRPAGDGTFQKWAAVVVPSGQEQRYTCHMQHEGLQEPLTLSWEPSSQPTIPIMGIVAGLAVLVVLAVLGAVVTAMMCRRKSSGGKGGSCSQAACSNSAQGSDESLITCKA

SEQ ID NO: 35 - protein, 362 aa, Homo sapiens
  HLA-B*08:01 full-length
MLVMAPRTVLLLLSAALALTETWAGSHSMRYFDTAMSRPGRGEPRFISVGYVDDTQFVRFDSDAASPREEPRAPWIEQEGPEYWDRNTQIFKTNTQTDRESLRNLRGYYNQSEAGSHTLQSMYGCDVGPDGRLLRGHNQYAYDGKDYIALNEDLRSWTAADTAAQITQRKWEAARVAEQDRAYLEGTCVEWLRRYLENGKDTLERADPPKTHVTHHPISDHEATLRCWALGFYPAEITLTWQRDGEDQTQDTELVETRPAGDRTFQKWAAVVVPSGEEQRYTCHVQHEGLPKPLTLRWEPSSQSTVPIVGIVAGLAVLAVVVIGAVVAAVMCRRKSSGGKGGSYSQAACSDSAQGSDVSLTA

SEQ ID NO: 36 - protein, 362 aa, Homo sapiens [sequence omitted]

SEQ ID NO: 37 - protein, 362 aa, Homo sapiens [sequence omitted]

SEQ ID NO: 38 - protein, 362 aa, Homo sapiens [sequence omitted]

SEQ ID NO: 39 - protein, 358 aa, Homo sapiens
  HLA-E full-length
MVDGTLLLLLSEALALTQTWAGSHSLKYFHTSVSRPGRGEPRFISVGYVDDTQFVRFDNDAASPRMVPRAPWMEQEGSEYWDRETRSARDTAQIFRVNLRTLRGYYNQSEAGSHTLQWMHGCELGPDGRFLRGYEQFAYDGKDYLTLNEDLRSWTAVDTAAQISEQKSNDASEAEHQRAYLEDTCVEWLHKYLEKGKETLLHLEPPKTHVTHHPISDHEATLRCWALGFYPAEITLTWQQDGEGHTQDTELVETRPAGDGTFQKWAAVVVPSGEEQRYTCHVQHEGLPEPVTLRWKPASQPTIPIVGIIAGLVLLGSVVSGAVVAAVIWRKKSSGGKGGSYSKAEWSDSAQGSESHSL

SEQ ID NO: 40 - protein, 366 aa, Homo sapiens
  HLA-C*16:01 full-length
MRVMAPRTLILLLSGALALTETWACSHSMRYFYTAVSRPGRGEPRFIAVGYVDDTQFVRFDSDAASPRGEPRAPWVEQEGPEYWDRETQKYKRQAQTDRVSLRNLRGYYNQSEAGSHTLQWMYGCDLGPDGRLLRGYDQSAYDGKDYIALNEDLRSWTAADTAAQITQRKWEAARAAEQQRAYLEGTCVEWLRRYLENGKETLQRAEHPKTHVTHHLVSDHEATLRCWALGFYPAEITLTWQRDGEDQTQDTELVETRPAGDGTFQKWAAVVVPSGEEQRYTCHVQHEGLPEPLTLRWEPSSQPTIPIVGIVAGLAVLAVLAVLGAVVAVVMCRRKSSGGKGGSCSQAASSNSAQGSDESLIACKA

SEQ ID NO: 41 - protein, 366 aa, Homo sapiens [sequence omitted]

SEQ ID NO: 42 - protein, 366 aa, Homo sapiens
  HLA-C*07:01 full-length
MRVMAPRALLLLLSGGLALTETWACSHSMRYFDTAVSRPGRGEPRFISVGYVDDTQFVRFDSDAASPRGEPRAPWVEQEGPEYWDRETQNYKRQAQADRVSLRNLRGYYNQSEDGSHTLQRMYGCDLGPDGRLLRGYDQSAYDGKDYIALNEDLRSWTAADTAAQITQRKLEAARAAEQLRAYLEGTCVEWLRRYLENGKETLQRAEPPKTHVTHHPLSDHEATLRCWALGFYPAEITLTWQRDGEDQTQDTELVETRPAGDGTFQKWAAVVVPSGQEQRYTCHMQHEGLQEPLTLSWEPSSQPTIPIMGIVAGLAVLVVLAVLGAVVTAMMCRRKSSGGKGGSCSQAACSNSAQGSDESLITCKA

SEQ ID NO: 43 - protein, 366 aa, Homo sapiens
  HLA-C*05:01 full-length
MRVMAPRTLILLLSGALALTETWACSHSMRYFYTAVSRPGRGEPRFIAVGYVDDTQFVQFDSDAASPRGEPRAPWVEQEGPEYWDRETQKYKRQAQTDRVNLRKLRGYYNQSEAGSHTLQRMYGCDLGPDGRLLRGYNQFAYDGKDYIALNEDLRSWTAADKAAQITQRKWEAAREAEQRRAYLEGTCVEWLRRYLENGKKTLQRAEHPKTHVTHHPVSDHEATLRCWALGFYPAEITLTWQRDGEDQTQDTELVETRPAGDGTFQKWAAVVVPSGEEQRYTCHVQHEGLPEPLTLRWGPSSQPTIPIVGIVAGLAVLAVLAVLGAVMAVVMCRRKSSGGKGGSCSQAASSNSAQGSDESLIACKA

SEQ ID NO: 44 - protein, 362 aa, Homo sapiens
  HLA-B*44:02 full-length
MRVTAPRTLLLLLWGAVALTETWAGSHSMRYFYTAMSRPGRGEPRFITVGYVDDTLFVRFDSDATSPRKEPRAPWIEQEGPEYWDRETQISKTNTQTYRENLRTALRYYNQSEAGSHIIQRMYGCDVGPDGRLLRGYDQDAYDGKDYIALNEDLSSWTAADTAAQITQRKWEAARVAEQDRAYLEGLCVESLRRYLENGKETLQRADPPKTHVTHHPISDHEVTLRCWALGFYPAEITLTWQRDGEDQTQDTELVETRPAGDRTFQKWAAVVVPSGEEQRYTCHVQHEGLPKPLTLRWEPSSQSTVPIVGIVAGLAVLAVVVIGAVVAAVMCRRKSSGGKGGSYSQAACSDSAQGSDVSLTA

SEQ ID NO: 45 - protein, 365 aa, Homo sapiens
  HLA-A*29:02 full-length
MAVMAPRTLLLLLLGALALTQTWAGSHSMRYFTTSVSRPGRGEPRFIAVGYVDDTQFVRFDSDAASQRMEPRAPWIEQEGPEYWDLQTRNVKAQSQTDRANLGTLRGYYNQSEAGSHTIQMMYGCDVGSDGRFLRGYRQDAYDGKDYIALNEDLRSWTAADMAAQITQRKWEAARVAEQLRAYLEGTCVEWLRRYLENGKETLQRTDAPKTHMTHHAVSDHEATLRCWALSFYPAEITLTWQRDGEDQTQDTELVETRPAGDGTFQKWASVVVPSGQEQRYTCHVQHEGLPKPLTLRWEPSSQPTIPIVGIIAGLVLFGAVFAGAVVAAVRWRRKSSDRKGGSYSQAASSDSAQGSDMSLTACKV

SEQ ID NO: 46 - protein, 362 aa, Homo sapiens
  HLA-B*44:03 full-length
MRVTAPRTLLLLLWGAVALTETWAGSHSMRYFYTAMSRPGRGEPRFITVGYVDDTLFVRFDSDATSPRKEPRAPWIEQEGPEYWDRETQISKTNTQTYRENLRTALRYYNQSEAGSHIIQRMYGCDVGPDGRLLRGYDQDAYDGKDYIALNEDLSSWTAADTAAQITQRKWEAARVAEQLRAYLEGLCVESLRRYLENGKETLQRADPPKTHVTHHPISDHEVTLRCWALGFYPAEITLTWQRDGEDQTQDTELVETRPAGDRTFQKWAAVVVPSGEEQRYTCHVQHEGLPKPLTLRWEPSSQSTVPIVGIVAGLAVLAVVVIGAVVAAVMCRRKSSGGKGGSYSQAACSDSAQGSDVSLTA

SEQ ID NO: 47 - protein, 366 aa, Homo sapiens
  HLA-C*03:04 full-length
MRVMAPRTLILLLSGALALTETWAGSHSMRYFYTAVSRPGRGEPHFIAVGYVDDTQFVRFDSDAASPRGEPRAPWVEQEGPEYWDRETQKYKRQAQTDRVSLRNLRGYYNQSEAGSHIIQRMYGCDVGPDGRLLRGYDQYAYDGKDYIALNEDLRSWTAADTAAQITQRKWEAAREAEQLRAYLEGLCVEWLRRYLKNGKETLQRAEHPKTHVTHHPVSDHEATLRCWALGFYPAEITLTWQWDGEDQTQDTELVETRPAGDGTFQKWAAVVVPSGEEQRYTCHVQHEGLPEPLTLRWEPSSQPTIPIVGIVAGLAVLAVLAVLGAVVAVVMCRRKSSGGKGGSCSQAASSNSAQGSDESLIACKA

SEQ ID NO: 48 - protein, 362 aa, Homo sapiens [sequence omitted]

SEQ ID NO: 49 - protein, 366 aa, Homo sapiens
  HLA-C*06:02 full-length
MRVMAPRTLILLLSGALALTETWACSHSMRYFDTAVSRPGRGEPRFISVGYVDDTQFVRFDSDAASPRGEPRAPWVEQEGPEYWDRETQKYKRQAQADRVNLRKLRGYYNQSEDGSHTLQWMYGCDLGPDGRLLRGYDQSAYDGKDYIALNEDLRSWTAADTAAQITQRKWEAAREAEQWRAYLEGTCVEWLRRYLENGKETLQRAEHPKTHVTHHPVSDHEATLRCWALGFYPAEITLTWQRDGEDQTQDTELVETRPAGDGTFQKWAAVVVPSGEEQRYTCHVQHEGLPEPLTLRWEPSSQPTIPIVGIVAGLAVLAVLAVLGAVMAVVMCRRKSSGGKGGSCSQAASSNSAQGSDESLIACKA

SEQ ID NO: 50 - protein, 362 aa, Homo sapiens
  HLA-B*15:01 full-length
MRVTAPRTVLLLLSGALALTETWAGSHSMRYFYTAMSRPGRGEPRFIAVGYVDDTQFVRFDSDAASPRMAPRAPWIEQEGPEYWDRETQISKTNTQTYRESLRNLRGYYNQSEAGSHTLQRMYGCDVGPDGRLLRGHDQSAYDGKDYIALNEDLSSWTAADTAAQITQRKWEAAREAEQWRAYLEGLCVEWLRRYLENGKETLQRADPPKTHVTHHPISDHEATLRCWALGFYPAEITLTWQRDGEDQTQDTELVETRPAGDRTFQKWAAVVVPSGEEQRYTCHVQHEGLPKPLTLRWEPSSQSTIPIVGIVAGLAVLAVVVIGAVVATVMCRRKSSGGKGGSYSQAASSDSAQGSDVSLTA

SEQ ID NO: 51 - protein, 366 aa, Homo sapiens [sequence omitted]

SEQ ID NO: 52 - protein, 365 aa, Homo sapiens [sequence omitted]

SEQ ID NO: 53 - protein, 362 aa, Homo sapiens
  HLA-B*13:02 full-length
MRVTAPRTLLLLLWGAVALTETWAGSHSMRYFYTAMSRPGRGEPRFITVGYVDDTQFVRFDSDATSPRMAPRAPWIEQEGPEYWDRETQISKTNTQTYRENLRTALRYYNQSEAGSHTWQTMYGCDLGPDGRLLRGHNQLAYDGKDYIALNEDLSSWTAADTAAQITQLKWEAARVAEQLRAYLEGECVEWLRRYLENGKETLQRADPPKTHVTHHPISDHEATLRCWALGFYPAEITLTWQRDGEDQTQDTELVETRPAGDRTFQKWAAVVVPSGEEQRYTCHVQHEGLPKPLTLRWEPSSQSTVPIVGIVAGLAVLAVVVIGAVVAAVMCRRKSSGGKGGSYSQAACSDSAQGSDVSLTA

SEQ ID NO: 54 - protein, 366 aa, Homo sapiens [sequence omitted]

SEQ ID NO: 55 - protein, 365 aa, Homo sapiens
  HLA-A*26:01 full-length
MAVMAPRTLVLLLSGALALTQTWAGSHSMRYFYTSVSRPGRGEPRFIAVGYVDDTQFVRFDSDAASQRMEPRAPWIEQEGPEYWDRNTRNVKAHSQTDRANLGTLRGYYNQSEDGSHTIQRMYGCDVGPDGRFLRGYQQDAYDGKDYIALNEDLRSWTAADMAAQITQRKWETAHEAEQWRAYLEGRCVEWLRRYLENGKETLQRTDAPKTHMTHHAVSDHEATLRCWALSFYPAEITLTWQRDGEDQTQDTELVETRPAGDGTFQKWASVVVPSGQEQRYTCHVQHEGLPKPLTLRWEPSSQPTIPIVGIIAGLVLFGAVIAGAVVAAVMWRRKSSDRKGGSYSQAASSDSAQGSDMSLTACKV

SEQ ID NO: 56 - protein, 362 aa, Homo sapiens [sequence omitted]

SEQ ID NO: 57 - protein, 362 aa, Homo sapiens
  HLA-B*14:02 full-length
MLVMAPRTVLLLLSAALALTETWAGSHSMRYFYTAVSRPGRGEPRFISVGYVDDTQFVRFDSDAASPREEPRAPWIEQEGPEYWDRNTQICKTNTQTDRESLRNLRGYYNQSEAGSHTLQWMYGCDVGPDGRLLRGYNQFAYDGKDYIALNEDLSSWTAADTAAQITQRKWEAAREAEQLRAYLEGTCVEWLRRHLENGKETLQRADPPKTHVTHHPISDHEATLRCWALGFYPAEITLTWQRDGEDQTQDTELVETRPAGDRTFQKWAAVVVPSGEEQRYTCHVQHEGLPKPLTLRWEPSSQSTVPIVGIVAGLAVLAVVVIGAVVAAVMCRRKSSGGKGGSYSQAASSDSAQGSDVSLTA

SEQ ID NO: 58 - protein, 365 aa, Homo sapiens [sequence omitted]

SEQ ID NO: 59 - protein, 365 aa, Homo sapiens [sequence omitted]

SEQ ID NO: 60 - protein, 365 aa, Homo sapiens
  HLA-A*25:01 full-length
MAVMAPRTLVLLLSGALALTQTWAGSHSMRYFYTSVSRPGRGEPRFIAVGYVDDTQFVRFDSDAASQRMEPRAPWIEQEGPEYWDRNTRNVKAHSQTDRESLRIALRYYNQSEDGSHTIQRMYGCDVGPDGRFLRGYQQDAYDGKDYIALNEDLRSWTAADMAAQITQRKWETAHEAEQWRAYLEGRCVEWLRRYLENGKETLQRTDAPKTHMTHHAVSDHEATLRCWALSFYPAEITLTWQRDGEDQTQDTELVETRPAGDGTFQKWASVVVPSGQEQRYTCHVQHEGLPKPLTLRWEPSSQPTIPIVGIIAGLVLFGAVIAGAVVAAVMWRRKSSDRKGGSYSQAASSDSAQGSDMSLTACKV

SEQ ID NO: 61 - protein, 362 aa, Homo sapiens
  HLA-B*18:01 full-length
MRVTAPRTLLLLLWGAVALTETWAGSHSMRYFHTSVSRPGRGEPRFISVGYVDGTQFVRFDSDAASPRTEPRAPWIEQEGPEYWDRNTQISKTNTQTYRESLRNLRGYYNQSEAGSHTLQRMYGCDVGPDGRLLRGHDQSAYDGKDYIALNEDLSSWTAADTAAQITQRKWEAARVAEQLRAYLEGTCVEWLRRHLENGKETLQRADPPKTHVTHHPISDHEATLRCWALGFYPAEITLTWQRDGEDQTQDTELVETRPAGDRTFQKWAAVVVPSGEEQRYTCHVQHEGLPKPLTLRWEPSSQSTIPIVGIVAGLAVLAVVVIGAVVATVMCRRKSSGGKGGSYSQAASSDSAQGSDVSLTA

SEQ ID NO: 62 - protein, 362 aa, Homo sapiens [sequence omitted]

SEQ ID NO: 63 - protein, 362 aa, Homo sapiens [sequence omitted]

SEQ ID NO: 64 - protein, 366 aa, Homo sapiens [sequence omitted]

SEQ ID NO: 65 - protein, 366 aa, Homo sapiens [sequence omitted]

SEQ ID NO: 66 - protein, 366 aa, Homo sapiens [sequence omitted]

SEQ ID NO: 67 - protein, 362 aa, Homo sapiens [sequence omitted]

SEQ ID NO: 68 - protein, 365 aa, Homo sapiens [sequence omitted]

SEQ ID NO: 69 - protein, 365 aa, Homo sapiens [sequence omitted]

SEQ ID NO: 70 - protein, 362 aa, Homo sapiens
  HLA-B*42:01 full-length
MLVMAPRTVLLLLSAALALTETWAGSHSMRYFYTSVSRPGRGEPRFISVGYVDDTQFVRFDSDAASPREEPRAPWIEQEGPEYWDRNTQIYKAQAQTDRESLRNLRGYYNQSEAGSHTLQSMYGCDVGPDGRLLRGHNQYAYDGKDYIALNEDLRSWTAADTAAQITQRKWEAARVAEQDRAYLEGTCVEWLRRYLENGKDTLERADPPKTHVTHHPISDHEATLRCWALGFYPAEITLTWQRDGEDQTQDTELVETRPAGDRTFQKWAAVVVPSGEEQRYTCHVQHEGLPKPLTLRWEPSSQSTVPIVGIVAGLAVLAVVVIGAVVAAVMCRRKSSGGKGGSYSQAACSDSAQGSDVSLTA

SEQ ID NO: 71 - protein, 372 aa, Homo sapiens
  HLA-C*17:01 full-length
MRVMAPQALLLLLSGALALIETWAGSHSMRYFYTAVSRPGRGEPRFIAVGYVDDTQFVRFDSDAASPRGEPRAPWVEQEGPEYWDRETQKYKRQAQADRVNLRKLRGYYNQSEAGSHTIQRMYGCDLGPDGRLLRGYNQFAYDGKDYIALNEDLRSWTAADTAAQISQRKLEAAREAEQLRAYLEGECVEWLRGYLENGKETLQRAERPKTHVTHHPVSDHEATLRCWALGFYPAEITLTWQRDGEDQTQDTELVETRPAGDGTFQKWAAVVVPSGQEQRYTCHVQHEGLQEPCTLRWKPSSQPTIPNLGIVSGPAVLAVLAVLAVLAVLGAVVAAVIHRRKSSGGKGGSCSQAASSNSAQGSDESLIACKA

SEQ ID NO: 72 - protein, 362 aa, Homo sapiens [sequence omitted]

SEQ ID NO: 73 - protein, 362 aa, Homo sapiens [sequence omitted]

SEQ ID NO: 74 - protein, 366 aa, Homo sapiens [sequence omitted]

SEQ ID NO: 75 - protein, 362 aa, Homo sapiens [sequence omitted]

SEQ ID NO: 76 - protein, 365 aa, Homo sapiens [sequence omitted]

SEQ ID NO: 77 - protein, 365 aa, Homo sapiens [sequence omitted]

SEQ ID NO: 78 - protein, 366 aa, Homo sapiens
  HLA-C*01:02 full-length
MRVMAPRTLILLLSGALALTETWACSHSMKYFFTSVSRPGRGEPRFISVGYVDDTQFVRFDSDAASPRGEPRAPWVEQEGPEYWDRETQKYKRQAQTDRVSLRNLRGYYNQSEAGSHTLQWMCGCDLGPDGRLLRGYDQYAYDGKDYIALNEDLRSWTAADTAAQITQRKWEAAREAEQRRAYLEGTCVEWLRRYLENGKETLQRAEHPKTHVTHHPVSDHEATLRCWALGFYPAEITLTWQWDGEDQTQDTELVETRPAGDGTFQKWAAVMVPSGEEQRYTCHVQHEGLPEPLTLRWEPSSQPTIPIVGIVAGLAVLAVLAVLGAVVAVVMCRRKSSGGKGGSCSQAASSNSAQGSDESLIACKA

SEQ ID NO: 79 - protein, 366 aa, Homo sapiens [sequence omitted]

SEQ ID NO: 80 - protein, 365 aa, Homo sapiens [sequence omitted]

SEQ ID NO: 81 - protein, 365 aa, Homo sapiens
  HLA-A*32:01 full-length
MAVMAPRTLLLLLLGALALTQTWAGSHSMRYFFTSVSRPGRGEPRFIAVGYVDDTQFVRFDSDAASQRMEPRAPWIEQEGPEYWDQETRNVKAHSQTDRESLRIALRYYNQSEAGSHTIQMMYGCDVGPDGRLLRGYQQDAYDGKDYIALNEDLRSWTAADMAAQITQRKWEAARVAEQLRAYLEGTCVEWLRRYLENGKETLQRTDAPKTHMTHHAVSDHEATLRCWALSFYPAEITLTWQRDGEDQTQDTELVETRPAGDGTFQKWASVVVPSGQEQRYTCHVQHEGLPKPLTLRWEPSSQPTIPIVGIIAGLVLFGAMFAGAVVAAVRWRRKSSDRKGGSYSQAASSDSAQGSDMSLTACKV

SEQ ID NO: 82 - protein, 362 aa, Homo sapiens [sequence omitted]

SEQ ID NO: 83 - protein, 362 aa, Homo sapiens [sequence omitted]

SEQ ID NO: 84 - protein, 362 aa, Homo sapiens [sequence omitted]

SEQ ID NO: 85 - protein, 365 aa, Homo sapiens [sequence omitted]

SEQ ID NO: 86 - protein, 362 aa, Homo sapiens [sequence omitted]

SEQ ID NO: 87 - protein, 362 aa, Homo sapiens [sequence omitted]

SEQ ID NO: 88 - protein, 362 aa, Homo sapiens [sequence omitted]

SEQ ID NO: 89 - protein, 366 aa, Homo sapiens
  HLA-C*12:02 full-length
MRVMAPRTLILLLSGALALTETWACSHSMRYFYTAVSRPGRGEPRFIAVGYVDDTQFVRFDSDAASPRGEPRAPWVEQEGPEYWDRETQKYKRQAQADRVSLRNLRGYYNQSEAGSHTLQRMYGCDLGPDGRLLRGYDQSAYDGKDYIALNEDLRSWTAADTAAQITQRKWEAAREAEQWRAYLEGTCVEWLRRYLENGKETLQRAEHPKTHVTHHPVSDHEATLRCWALGFYPAEITLTWQRDGEDQTQDTELVETRPAGDGTFQKWAAVVVPSGEEQRYTCHVQHEGLPEPLTLRWEPSSQPTIPIVGIVAGLAVLAVLAVLGAVMAVVMCRRKSSGGKGGSCSQAASSNSAQGSDESLIACKA

SEQ ID NO: 90 - protein, 362 aa, Homo sapiens [sequence omitted]

SEQ ID NO: 91 - protein, 362 aa, Homo sapiens [sequence omitted]

SEQ ID NO: 92 - protein, 362 aa, Homo sapiens [sequence omitted]

SEQ ID NO: 93 - protein, 365 aa, Homo sapiens [sequence omitted]

SEQ ID NO: 94 - protein, 278 aa, Artificial Sequence
  Description of Artificial Sequence: Synthetic polypeptide
  HLA-A*01:01 soluble
GSHSMRYFFTSVSRPGRGEPRFIAVGYVDDTQFVRFDSDAASQKMEPRAPWIEQEGPEYWDQETRNMKAHSQTDRANLGTLRGYYNQSEDGSHTIQIMYGCDVGPDGRFLRGYRQDAYDGKDYIALNEDLRSWTAADMAAQITKRKWEAVHAAEQRRVYLEGRCVDGLRRYLENGKETLQRTDPPKTHMTHHPISDHEATLRCWALGFYPAEITLTWQRDGEDQTQDTELVETRPAGDGTFQKWAAVVVPSGEEQRYTCHVQHEGLPKPLTLRWELSS

SEQ ID NO: 95 - protein, 278 aa, Artificial Sequence
  Description of Artificial Sequence: Synthetic polypeptide
  HLA-A*03:01 soluble
GSHSMRYFFTSVSRPGRGEPRFIAVGYVDDTQFVRFDSDAASQRMEPRAPWIEQEGPEYWDQETRNVKAQSQTDRVDLGTLRGYYNQSEAGSHTIQIMYGCDVGSDGRFLRGYRQDAYDGKDYIALNEDLRSWTAADMAAQITKRKWEAAHEAEQLRAYLDGTCVEWLRRYLENGKETLQRTDPPKTHMTHHPISDHEATLRCWALGFYPAEITLTWQRDGEDQTQDTELVETRPAGDGTFQKWAAVVVPSGEEQRYTCHVQHEGLPKPLTLRWELSS

SEQ ID NO: 96 - protein, 278 aa, Artificial Sequence
  Description of Artificial Sequence: Synthetic polypeptide
  HLA-A*11:01 soluble
GSHSMRYFYTSVSRPGRGEPRFIAVGYVDDTQFVRFDSDAASQRMEPRAPWIEQEGPEYWDQETRNVKAQSQTDRVDLGTLRGYYNQSEDGSHTIQIMYGCDVGPDGRFLRGYRQDAYDGKDYIALNEDLRSWTAADMAAQITKRKWEAAHAAEQQRAYLEGRCVEWLRRYLENGKETLQRTDPPKTHMTHHPISDHEATLRCWALGFYPAEITLTWQRDGEDQTQDTELVETRPAGDGTFQKWAAVVVPSGEEQRYTCHVQHEGLPKPLTLRWELSS

SEQ ID NO: 97 - protein, 278 aa, Artificial Sequence
  Description of Artificial Sequence: Synthetic polypeptide
  HLA-A*24:02 soluble
GSHSMRYFSTSVSRPGRGEPRFIAVGYVDDTQFVRFDSDAASQRMEPRAPWIEQEGPEYWDEETGKVKAHSQTDRENLRIALRYYNQSEAGSHTLQMMFGCDVGSDGRFLRGYHQYAYDGKDYIALKEDLRSWTAADMAAQITKRKWEAAHVAEQQRAYLEGTCVDGLRRYLENGKETLQRTDPPKTHMTHHPISDHEATLRCWALGFYPAEITLTWQRDGEDQTQDTELVETRPAGDGTFQKWAAVVVPSGEEQRYTCHVQHEGLPKPLTLRWEPSS

SEQ ID NO: 98 - protein, 278 aa, Artificial Sequence
  Description of Artificial Sequence: Synthetic polypeptide
  HLA-B*07:02 soluble
GSHSMRYFYTSVSRPGRGEPRFISVGYVDDTQFVRFDSDAASPREEPRAPWIEQEGPEYWDRNTQIYKAQAQTDRESLRNLRGYYNQSEAGSHTLQSMYGCDVGPDGRLLRGHDQYAYDGKDYIALNEDLRSWTAADTAAQITQRKWEAAREAEQRRAYLEGECVEWLRRYLENGKDKLERADPPKTHVTHHPISDHEATLRCWALGFYPAEITLTWQRDGEDQTQDTELVETRPAGDRTFQKWAAVVVPSGEEQRYTCHVQHEGLPKPLTLRWEPSS

SEQ ID NO: 99 - protein, 278 aa, Artificial Sequence
  Description of Artificial Sequence: Synthetic polypeptide
  HLA-C*04:01 soluble
GSHSMRYFSTSVSWPGRGEPRFIAVGYVDDTQFVRFDSDAASPRGEPREPWVEQEGPEYWDRETQKYKRQAQADRVNLRKLRGYYNQSEDGSHTLQRMFGCDLGPDGRLLRGYNQFAYDGKDYIALNEDLRSWTAADTAAQITQRKWEAAREAEQRRAYLEGTCVEWLRRYLENGKETLQRAEHPKTHVTHHPVSDHEATLRCWALGFYPAEITLTWQWDGEDQTQDTELVETRPAGDGTFQKWAAVVVPSGEEQRYTCHVQHEGLPEPLTLRWKPSS

SEQ ID NO: 100 - protein, 278 aa, Artificial Sequence
  Description of Artificial Sequence: Synthetic polypeptide
  HLA-C*07:02 soluble
CSHSMRYFDTAVSRPGRGEPRFISVGYVDDTQFVRFDSDAASPRGEPRAPWVEQEGPEYWDRETQKYKRQAQADRVSLRNLRGYYNQSEDGSHTLQRMSGCDLGPDGRLLRGYDQSAYDGKDYIALNEDLRSWTAADTAAQITQRKLEAARAAEQLRAYLEGTCVEWLRRYLENGKETLQRAEPPKTHVTHHPLSDHEATLRCWALGFYPAEITLTWQRDGEDQTQDTELVETRPAGDGTFQKWAAVVVPSGQEQRYTCHMQHEGLQEPLTLSWEPSS

SEQ ID NO: 101 - protein, 278 aa, Artificial Sequence
  Description of Artificial Sequence: Synthetic polypeptide
  HLA-B*08:01 soluble
GSHSMRYFDTAMSRPGRGEPRFISVGYVDDTQFVRFDSDAASPREEPRAPWIEQEGPEYWDRNTQIFKTNTQTDRESLRNLRGYYNQSEAGSHTLQSMYGCDVGPDGRLLRGHNQYAYDGKDYIALNEDLRSWTAADTAAQITQRKWEAARVAEQDRAYLEGTCVEWLRRYLENGKDTLERADPPKTHVTHHPISDHEATLRCWALGFYPAEITLTWQRDGEDQTQDTELVETRPAGDRTFQKWAAVVVPSGEEQRYTCHVQHEGLPKPLTLRWEPSS

SEQ ID NO: 102 - protein, 278 aa, Artificial Sequence
  Description of Artificial Sequence: Synthetic polypeptide
  HLA-B*35:01 soluble
GSHSMRYFYTAMSRPGRGEPRFIAVGYVDDTQFVRFDSDAASPRTEPRAPWIEQEGPEYWDRNTQIFKTNTQTYRESLRNLRGYYNQSEAGSHIIQRMYGCDLGPDGRLLRGHDQSAYDGKDYIALNEDLSSWTAADTAAQITQRKWEAARVAEQLRAYLEGLCVEWLRRYLENGKETLQRADPPKTHVTHHPVSDHEATLRCWALGFYPAEITLTWQRDGEDQTQDTELVETRPAGDRTFQKWAAVVVPSGEEQRYTCHVQHEGLPKPLTLRWEPSS

SEQ ID NO: 103 - protein, 278 aa, Artificial Sequence
  Description of Artificial Sequence: Synthetic polypeptide
  HLA-B*57:01 soluble
GSHSMRYFYTAMSRPGRGEPRFIAVGYVDDTQFVRFDSDAASPRMAPRAPWIEQEGPEYWDGETRNMKASAQTYRENLRIALRYYNQSEAGSHIIQVMYGCDVGPDGRLLRGHDQSAYDGKDYIALNEDLSSWTAADTAAQITQRKWEAARVAEQLRAYLEGLCVEWLRRYLENGKETLQRADPPKTHVTHHPISDHEATLRCWALGFYPAEITLTWQRDGEDQTQDTELVETRPAGDRTFQKWAAVVVPSGEEQRYTCHVQHEGLPKPLTLRWEPSS

SEQ ID NO: 104 - protein, 278 aa, Artificial Sequence
  Description of Artificial Sequence: Synthetic polypeptide
  HLA-B*57:03 soluble
GSHSMRYFYTAMSRPGRGEPRFIAVGYVDDTQFVRFDSDAASPRMAPRAPWIEQEGPEYWDGETRNMKASAQTYRENLRIALRYYNQSEAGSHIIQVMYGCDVGPDGRLLRGHNQYAYDGKDYIALNEDLSSWTAADTAAQITQRKWEAARVAEQLRAYLEGLCVEWLRRYLENGKETLQRADPPKTHVTHHPISDHEATLRCWALGFYPAEITLTWQRDGEDQTQDTELVETRPAGDRTFQKWAAVVVPSGEEQRYTCHVQHEGLPKPLTLRWEPSS

SEQ ID NO: 105 - protein, 278 aa, Artificial Sequence
  Description of Artificial Sequence: Synthetic polypeptide
  HLA-E soluble
GSHSLKYFHTSVSRPGRGEPRFISVGYVDDTQFVRFDNDAASPRMVPRAPWMEQEGSEYWDRETRSARDTAQIFRVNLRTLRGYYNQSEAGSHTLQWMHGCELGPDGRFLRGYEQFAYDGKDYLTLNEDLRSWTAVDTAAQISEQKSNDASEAEHQRAYLEDTCVEWLHKYLEKGKETLLHLEPPKTHVTHHPISDHEATLRCWALGFYPAEITLTWQQDGEGHTQDTELVETRPAGDGTFQKWAAVVVPSGEEQRYTCHVQHEGLPEPVTLRWKPAS

SEQ ID NO: 106 - protein, 278 aa, Artificial Sequence
  Description of Artificial Sequence: Synthetic polypeptide
  HLA-C*16:01 soluble
CSHSMRYFYTAVSRPGRGEPRFIAVGYVDDTQFVRFDSDAASPRGEPRAPWVEQEGPEYWDRETQKYKRQAQTDRVSLRNLRGYYNQSEAGSHTLQWMYGCDLGPDGRLLRGYDQSAYDGKDYIALNEDLRSWTAADTAAQITQRKWEAARAAEQQRAYLEGTCVEWLRRYLENGKETLQRAEHPKTHVTHHLVSDHEATLRCWALGFYPAEITLTWQRDGEDQTQDTELVETRPAGDGTFQKWAAVVVPSGEEQRYTCHVQHEGLPEPLTLRWEPSS

SEQ ID NO: 107 - protein, 278 aa, Artificial Sequence
  Description of Artificial Sequence: Synthetic polypeptide
  HLA-C*08:02 soluble
CSHSMRYFYTAVSRPGRGEPRFIAVGYVDDTQFVQFDSDAASPRGEPRAPWVEQEGPEYWDRETQKYKRQAQTDRVSLRNLRGYYNQSEAGSHTLQRMYGCDLGPDGRLLRGYNQFAYDGKDYIALNEDLRSWTAADKAAQITQRKWEAAREAEQRRAYLEGTCVEWLRRYLENGKKTLQRAEHPKTHVTHHPVSDHEATLRCWALGFYPAEITLTWQRDGEDQTQDTELVETRPAGDGTFQKWAAVVVPSGEEQRYTCHVQHEGLPEPLTLRWGPSS

SEQ ID NO: 108 - protein, 278 aa, Artificial Sequence
  Description of Artificial Sequence: Synthetic polypeptide
  HLA-C*07:01 soluble
CSHSMRYFDTAVSRPGRGEPRFISVGYVDDTQFVRFDSDAASPRGEPRAPWVEQEGPEYWDRETQNYKRQAQADRVSLRNLRGYYNQSEDGSHTLQRMYGCDLGPDGRLLRGYDQSAYDGKDYIALNEDLRSWTAADTAAQITQRKLEAARAAEQLRAYLEGTCVEWLRRYLENGKETLQRAEPPKTHVTHHPLSDHEATLRCWALGFYPAEITLTWQRDGEDQTQDTELVETRPAGDGTFQKWAAVVVPSGQEQRYTCHMQHEGLQEPLTLSWEPSS

SEQ ID NO: 109 - protein, 278 aa, Artificial Sequence
  Description of Artificial Sequence: Synthetic polypeptide
  HLA-C*05:01 soluble
CSHSMRYFYTAVSRPGRGEPRFIAVGYVDDTQFVQFDSDAASPRGEPRAPWVEQEGPEYWDRETQKYKRQAQTDRVNLRKLRGYYNQSEAGSHTLQRMYGCDLGPDGRLLRGYNQFAYDGKDYIALNEDLRSWTAADKAAQITQRKWEAAREAEQRRAYLEGTCVEWLRRYLENGKKTLQRAEHPKTHVTHHPVSDHEATLRCWALGFYPAEITLTWQRDGEDQTQDTELVETRPAGDGTFQKWAAVVVPSGEEQRYTCHVQHEGLPEPLTLRWGPSS

SEQ ID NO: 110 - protein, 278 aa, Artificial Sequence
  Description of Artificial Sequence: Synthetic polypeptide
  HLA-B*44:02 soluble
GSHSMRYFYTAMSRPGRGEPRFITVGYVDDTLFVRFDSDATSPRKEPRAPWIEQEGPEYWDRETQISKTNTQTYRENLRTALRYYNQSEAGSHIIQRMYGCDVGPDGRLLRGYDQDAYDGKDYIALNEDLSSWTAADTAAQITQRKWEAARVAEQDRAYLEGLCVESLRRYLENGKETLQRADPPKTHVTHHPISDHEVTLRCWALGFYPAEITLTWQRDGEDQTQDTELVETRPAGDRTFQKWAAVVVPSGEEQRYTCHVQHEGLPKPLTLRWEPSS

SEQ ID NO: 111 - protein, 278 aa, Artificial Sequence
  Description of Artificial Sequence: Synthetic polypeptide
  HLA-A*29:02 soluble
GSHSMRYFTTSVSRPGRGEPRFIAVGYVDDTQFVRFDSDAASQRMEPRAPWIEQEGPEYWDLQTRNVKAQSQTDRANLGTLRGYYNQSEAGSHTIQMMYGCDVGSDGRFLRGYRQDAYDGKDYIALNEDLRSWTAADMAAQITQRKWEAARVAEQLRAYLEGTCVEWLRRYLENGKETLQRTDAPKTHMTHHAVSDHEATLRCWALSFYPAEITLTWQRDGEDQTQDTELVETRPAGDGTFQKWASVVVPSGQEQRYTCHVQHEGLPKPLTLRWEPSS

SEQ ID NO: 112 - protein, 278 aa, Artificial Sequence
  Description of Artificial Sequence: Synthetic polypeptide
  HLA-B*44:03 soluble
GSHSMRYFYTAMSRPGRGEPRFITVGYVDDTLFVRFDSDATSPRKEPRAPWIEQEGPEYWDRETQISKTNTQTYRENLRTALRYYNQSEAGSHIIQRMYGCDVGPDGRLLRGYDQDAYDGKDYIALNEDLSSWTAADTAAQITQRKWEAARVAEQLRAYLEGLCVESLRRYLENGKETLQRADPPKTHVTHHPISDHEVTLRCWALGFYPAEITLTWQRDGEDQTQDTELVETRPAGDRTFQKWAAVVVPSGEEQRYTCHVQHEGLPKPLTLRWEPSS

SEQ ID NO: 113 - protein, 278 aa, Artificial Sequence
  Description of Artificial Sequence: Synthetic polypeptide
  HLA-C*03:04 soluble
GSHSMRYFYTAVSRPGRGEPHFIAVGYVDDTQFVRFDSDAASPRGEPRAPWVEQEGPEYWDRETQKYKRQAQTDRVSLRNLRGYYNQSEAGSHIIQRMYGCDVGPDGRLLRGYDQYAYDGKDYIALNEDLRSWTAADTAAQITQRKWEAAREAEQLRAYLEGLCVEWLRRYLKNGKETLQRAEHPKTHVTHHPVSDHEATLRCWALGFYPAEITLTWQWDGEDQTQDTELVETRPAGDGTFQKWAAVVVPSGEEQRYTCHVQHEGLPEPLTLRWEPSS

SEQ ID NO: 114 - protein, 278 aa, Artificial Sequence
  Description of Artificial Sequence: Synthetic polypeptide
  HLA-B*40:01 soluble
GSHSMRYFHTAMSRPGRGEPRFITVGYVDDTLFVRFDSDATSPRKEPRAPWIEQEGPEYWDRETQISKTNTQTYRESLRNLRGYYNQSEAGSHTLQRMYGCDVGPDGRLLRGHNQYAYDGKDYIALNEDLRSWTAADTAAQISQRKLEAARVAEQLRAYLEGECVEWLRRYLENGKDKLERADPPKTHVTHHPISDHEATLRCWALGFYPAEITLTWQRDGEDQTQDTELVETRPAGDRTFQKWAAVVVPSGEEQRYTCHVQHEGLPKPLTLRWEPSS

SEQ ID NO: 115 - protein, 278 aa, Artificial Sequence
  Description of Artificial Sequence: Synthetic polypeptide
  HLA-C*06:02 soluble
CSHSMRYFDTAVSRPGRGEPRFISVGYVDDTQFVRFDSDAASPRGEPRAPWVEQEGPEYWDRETQKYKRQAQADRVNLRKLRGYYNQSEDGSHTLQWMYGCDLGPDGRLLRGYDQSAYDGKDYIALNEDLRSWTAADTAAQITQRKWEAAREAEQWRAYLEGTCVEWLRRYLENGKETLQRAEHPKTHVTHHPVSDHEATLRCWALGFYPAEITLTWQRDGEDQTQDTELVETRPAGDGTFQKWAAVVVPSGEEQRYTCHVQHEGLPEPLTLRWEPSS

SEQ ID NO: 116 - protein, 278 aa, Artificial Sequence
  Description of Artificial Sequence: Synthetic polypeptide
  HLA-B*15:01 soluble
GSHSMRYFYTAMSRPGRGEPRFIAVGYVDDTQFVRFDSDAASPRMAPRAPWIEQEGPEYWDRETQISKTNTQTYRESLRNLRGYYNQSEAGSHTLQRMYGCDVGPDGRLLRGHDQSAYDGKDYIALNEDLSSWTAADTAAQITQRKWEAAREAEQWRAYLEGLCVEWLRRYLENGKETLQRADPPKTHVTHHPISDHEATLRCWALGFYPAEITLTWQRDGEDQTQDTELVETRPAGDRTFQKWAAVVVPSGEEQRYTCHVQHEGLPKPLTLRWEPSS

SEQ ID NO: 117 - protein, 278 aa, Artificial Sequence
  Description of Artificial Sequence: Synthetic polypeptide
  HLA-C*03:03 soluble
GSHSMRYFYTAVSRPGRGEPHFIAVGYVDDTQFVRFDSDAASPRGEPRAPWVEQEGPEYWDRETQKYKRQAQTDRVSLRNLRGYYNQSEARSHIIQRMYGCDVGPDGRLLRGYDQYAYDGKDYIALNEDLRSWTAADTAAQITQRKWEAAREAEQLRAYLEGLCVEWLRRYLKNGKETLQRAEHPKTHVTHHPVSDHEATLRCWALGFYPAEITLTWQWDGEDQTQDTELVETRPAGDGTFQKWAAVVVPSGEEQRYTCHVQHEGLPEPLTLRWEPSS

SEQ ID NO: 118 - protein, 278 aa, Artificial Sequence
  Description of Artificial Sequence: Synthetic polypeptide
  HLA-A*30:01 soluble
GSHSMRYFSTSVSRPGSGEPRFIAVGYVDDTQFVRFDSDAASQRMEPRAPWIEQERPEYWDQETRNVKAQSQTDRVDLGTLRGYYNQSEAGSHTIQIMYGCDVGSDGRFLRGYEQHAYDGKDYIALNEDLRSWTAADMAAQITQRKWEAARWAEQLRAYLEGTCVEWLRRYLENGKETLQRTDPPKTHMTHHPISDHEATLRCWALGFYPAEITLTWQRDGEDQTQDTELVETRPAGDGTFQKWAAVVVPSGEEQRYTCHVQHEGLPKPLTLRWELSS

SEQ ID NO: 119 - protein, 278 aa, Artificial Sequence
  Description of Artificial Sequence: Synthetic polypeptide
  HLA-B*13:02 soluble
GSHSMRYFYTAMSRPGRGEPRFITVGYVDDTQFVRFDSDATSPRMAPRAPWIEQEGPEYWDRETQISKTNTQTYRENLRTALRYYNQSEAGSHTWQTMYGCDLGPDGRLLRGHNQLAYDGKDYIALNEDLSSWTAADTAAQITQLKWEAARVAEQLRAYLEGECVEWLRRYLENGKETLQRADPPKTHVTHHPISDHEATLRCWALGFYPAEITLTWQRDGEDQTQDTELVETRPAGDRTFQKWAAVVVPSGEEQRYTCHVQHEGLPKPLTLRWEPSS

SEQ ID NO: 120 - protein, 278 aa, Artificial Sequence
  Description of Artificial Sequence: Synthetic polypeptide
  HLA-C*12:03 soluble
CSHSMRYFYTAVSRPGRGEPRFIAVGYVDDTQFVRFDSDAASPRGEPRAPWVEQEGPEYWDRETQKYKRQAQADRVSLRNLRGYYNQSEAGSHTLQWMYGCDLGPDGRLLRGYDQSAYDGKDYIALNEDLRSWTAADTAAQITQRKWEAAREAEQWRAYLEGTCVEWLRRYLENGKETLQRAEHPKTHVTHHPVSDHEATLRCWALGFYPAEITLTWQRDGEDQTQDTELVETRPAGDGTFQKWAAVVVPSGEEQRYTCHVQHEGLPEPLTLRWEPSS

SEQ ID NO: 121 - protein, 278 aa, Artificial Sequence
  Description of Artificial Sequence: Synthetic polypeptide
  HLA-A*26:01 soluble
GSHSMRYFYTSVSRPGRGEPRFIAVGYVDDTQFVRFDSDAASQRMEPRAPWIEQEGPEYWDRNTRNVKAHSQTDRANLGTLRGYYNQSEDGSHTIQRMYGCDVGPDGRFLRGYQQDAYDGKDYIALNEDLRSWTAADMAAQITQRKWETAHEAEQWRAYLEGRCVEWLRRYLENGKETLQRTDAPKTHMTHHAVSDHEATLRCWALSFYPAEITLTWQRDGEDQTQDTELVETRPAGDGTFQKWASVVVPSGQEQRYTCHVQHEGLPKPLTLRWEPSS

SEQ ID NO: 122 - protein, 278 aa, Artificial Sequence
  Description of Artificial Sequence: Synthetic polypeptide
  HLA-B*38:01 soluble
GSHSMRYFYTSVSRPGRGEPRFISVGYVDDTQFVRFDSDAASPREEPRAPWIEQEGPEYWDRNTQICKTNTQTYRENLRIALRYYNQSEAGSHTLQRMYGCDVGPDGRLLRGHNQFAYDGKDYIALNEDLSSWTAADTAAQITQRKWEAARVAEQLRTYLEGTCVEWLRRYLENGKETLQRADPPKTHVTHHPISDHEATLRCWALGFYPAEITLTWQRDGEDQTQDTELVETRPAGDRTFQKWAAVVVPSGEEQRYTCHVQHEGLPKPLTLRWEPSS

SEQ ID NO: 123 - protein, 278 aa, Artificial Sequence
  Description of Artificial Sequence: Synthetic polypeptide
  HLA-B*14:02 soluble
GSHSMRYFYTAVSRPGRGEPRFISVGYVDDTQFVRFDSDAASPREEPRAPWIEQEGPEYWDRNTQICKTNTQTDRESLRNLRGYYNQSEAGSHTLQWMYGCDVGPDGRLLRGYNQFAYDGKDYIALNEDLSSWTAADTAAQITQRKWEAAREAEQLRAYLEGTCVEWLRRHLENGKETLQRADPPKTHVTHHPISDHEATLRCWALGFYPAEITLTWQRDGEDQTQDTELVETRPAGDRTFQKWAAVVVPSGEEQRYTCHVQHEGLPKPLTLRWEPSS

SEQ ID NO: 124 - protein, 278 aa, Artificial Sequence
  Description of Artificial Sequence: Synthetic polypeptide
  HLA-A*33:01 soluble
GSHSMRYFTTSVSRPGRGEPRFIAVGYVDDTQFVRFDSDAASQRMEPRAPWIEQEGPEYWDRNTRNVKAHSQIDRVDLGTLRGYYNQSEAGSHTIQMMYGCDVGSDGRFLRGYQQDAYDGKDYIALNEDLRSWTAADMAAQITQRKWEAARVAEQLRAYLEGTCVEWLRRHLENGKETLQRTDPPRTHMTHHAVSDHEATLRCWALSFYPAEITLTWQRDGEDQTQDTELVETRPAGDGTFQKWASVVVPSGQEQRYTCHVQHEGLPKPLTLRWEPSS

SEQ ID NO: 125 - protein, 278 aa, Artificial Sequence
  Description of Artificial Sequence: Synthetic polypeptide
  HLA-A*23:01 soluble
GSHSMRYFSTSVSRPGRGEPRFIAVGYVDDTQFVRFDSDAASQRMEPRAPWIEQEGPEYWDEETGKVKAHSQTDRENLRIALRYYNQSEAGSHTLQMMFGCDVGSDGRFLRGYHQYAYDGKDYIALKEDLRSWTAADMAAQITQRKWEAARVAEQLRAYLEGTCVDGLRRYLENGKETLQRTDPPKTHMTHHPISDHEATLRCWALGFYPAEITLTWQRDGEDQTQDTELVETRPAGDGTFQKWAAVVVPSGEEQRYTCHVQHEGLPKPLTLRWEPSS

SEQ ID NO: 126 - protein, 278 aa, Artificial Sequence
  Description of Artificial Sequence: Synthetic polypeptide
  HLA-A*25:01 soluble
GSHSMRYFYTSVSRPGRGEPRFIAVGYVDDTQFVRFDSDAASQRMEPRAPWIEQEGPEYWDRNTRNVKAHSQTDRESLRIALRYYNQSEDGSHTIQRMYGCDVGPDGRFLRGYQQDAYDGKDYIALNEDLRSWTAADMAAQITQRKWETAHEAEQWRAYLEGRCVEWLRRYLENGKETLQRTDAPKTHMTHHAVSDHEATLRCWALSFYPAEITLTWQRDGEDQTQDTELVETRPAGDGTFQKWASVVVPSGQEQRYTCHVQHEGLPKPLTLRWEPSS

SEQ ID NO: 127 - protein, 278 aa, Artificial Sequence
  Description of Artificial Sequence: Synthetic polypeptide
  HLA-B*18:01 soluble
GSHSMRYFHTSVSRPGRGEPRFISVGYVDGTQFVRFDSDAASPRTEPRAPWIEQEGPEYWDRNTQISKTNTQTYRESLRNLRGYYNQSEAGSHTLQRMYGCDVGPDGRLLRGHDQSAYDGKDYIALNEDLSSWTAADTAAQITQRKWEAARVAEQLRAYLEGTCVEWLRRHLENGKETLQRADPPKTHVTHHPISDHEATLRCWALGFYPAEITLTWQRDGEDQTQDTELVETRPAGDRTFQKWAAVVVPSGEEQRYTCHVQHEGLPKPLTLRWEPSS

SEQ ID NO: 128 - protein, 278 aa, Artificial Sequence
  Description of Artificial Sequence: Synthetic polypeptide
  HLA-B*37:01 soluble
GSHSMRYFHTSVSRPGRGEPRFISVGYVDDTQFVRFDSDAASPRTEPRAPWIEQEGPEYWDRETQISKTNTQTYREDLRTLLRYYNQSEAGSHTIQRMSGCDVGPDGRLLRGYNQFAYDGKDYIALNEDLSSWTAADTAAQITQRKWEAARVAEQDRAYLEGTCVEWLRRYLENGKETLQRADPPKTHVTHHPISDHEATLRCWALGFYPAEITLTWQRDGEDQTQDTELVETRPAGDRTFQKWAAVVVPSGEEQRYTCHVQHEGLPKPLTLRWEPSS

SEQ ID NO: 129 - protein, 278 aa, Artificial Sequence
  Description of Artificial Sequence: Synthetic polypeptide
  HLA-B*51:01 soluble
GSHSMRYFYTAMSRPGRGEPRFIAVGYVDDTQFVRFDSDAASPRTEPRAPWIEQEGPEYWDRNTQIFKTNTQTYRENLRIALRYYNQSEAGSHTWQTMYGCDVGPDGRLLRGHNQYAYDGKDYIALNEDLSSWTAADTAAQITQRKWEAAREAEQLRAYLEGLCVEWLRRHLENGKETLQRADPPKTHVTHHPVSDHEATLRCWALGFYPAEITLTWQRDGEDQTQDTELVETRPAGDRTFQKWAAVVVPSGEEQRYTCHVQHEGLPKPLTLRWEPSS

SEQ ID NO: 130 - protein, 278 aa, Artificial Sequence
  Description of Artificial Sequence: Synthetic polypeptide
  HLA-C*14:02 soluble
CSHSMRYFSTSVSRPGRGEPRFIAVGYVDDTQFVRFDSDAASPRGEPRAPWVEQEGPEYWDRETQKYKRQAQTDRVSLRNLRGYYNQSEAGSHTLQWMFGCDLGPDGRLLRGYDQSAYDGKDYIALNEDLRSWTAADTAAQITQRKWEAAREAEQRRAYLEGTCVEWLRRYLENGKETLQRAEHPKTHVTHHPVSDHEATLRCWALGFYPAEITLTWQWDGEDQTQDTELVETRPAGDGTFQKWAAVVVPSGEEQRYTCHVQHEGLPEPLTLRWEPSS

SEQ ID NO: 131 - protein, 278 aa, Artificial Sequence
  Description of Artificial Sequence: Synthetic polypeptide
  HLA-C*15:02 soluble
CSHSMRYFYTAVSRPGRGEPHFIAVGYVDDTQFVRFDSDAASPRGEPRAPWVEQEGPEYWDRETQNYKRQAQTDRVNLRKLRGYYNQSEAGSHIIQRMYGCDLGPDGRLLRGHDQLAYDGKDYIALNEDLRSWTAADTAAQITQRKWEAAREAEQLRAYLEGTCVEWLRRYLENGKETLQRAEHPKTHVTHHPVSDHEATLRCWALGFYPAEITLTWQRDGEDQTQDTELVETRPAGDGTFQKWAAVVVPSGEEQRYTCHVQHEGLPEPLTLRWEPSS

SEQ ID NO: 132 - protein, 278 aa, Artificial Sequence
  Description of Artificial Sequence: Synthetic polypeptide
  HLA-C*02:02 soluble
CSHSMRYFYTAVSRPSRGEPHFIAVGYVDDTQFVRFDSDAASPRGEPRAPWVEQEGPEYWDRETQKYKRQAQTDRVNLRKLRGYYNQSEAGSHTLQRMYGCDLGPDGRLLRGYDQSAYDGKDYIALNEDLRSWTAADTAAQITQRKWEAAREAEQWRAYLEGECVEWLRRYLENGKETLQRAEHPKTHVTHHPVSDHEATLRCWALGFYPTEITLTWQRDGEDQTQDTELVETRPAGDGTFQKWAAVVVPSGEEQRYTCHVQHEGLPEPLTLRWEPSS

SEQ ID NO: 133 - protein, 278 aa, Artificial Sequence
  Description of Artificial Sequence: Synthetic polypeptide
  HLA-B*27:05 soluble
GSHSMRYFHTSVSRPGRGEPRFITVGYVDDTLFVRFDSDAASPREEPRAPWIEQEGPEYWDRETQICKAKAQTDREDLRTLLRYYNQSEAGSHTLQNMYGCDVGPDGRLLRGYHQDAYDGKDYIALNEDLSSWTAADTAAQITQRKWEAARVAEQLRAYLEGECVEWLRRYLENGKETLQRADPPKTHVTHHPISDHEATLRCWALGFYPAEITLTWQRDGEDQTQDTELVETRPAGDRTFQKWAAVVVPSGEEQRYTCHVQHEGLPKPLTLRWEPSS

SEQ ID NO: 134 - protein, 278 aa, Artificial Sequence
  Description of Artificial Sequence: Synthetic polypeptide
  HLA-A*31:01 soluble
GSHSMRYFTTSVSRPGRGEPRFIAVGYVDDTQFVRFDSDAASQRMEPRAPWIEQERPEYWDQETRNVKAHSQIDRVDLGTLRGYYNQSEAGSHTIQMMYGCDVGSDGRFLRGYQQDAYDGKDYIALNEDLRSWTAADMAAQITQRKWEAARVAEQLRAYLEGTCVEWLRRYLENGKETLQRTDPPKTHMTHHAVSDHEATLRCWALSFYPAEITLTWQRDGEDQTQDTELVETRPAGDGTFQKWASVVVPSGQEQRYTCHVQHEGLPKPLTLRWEPSS

SEQ ID NO: 135 - protein, 278 aa, Artificial Sequence
  Description of Artificial Sequence: Synthetic polypeptide
  HLA-A*30:02 soluble
GSHSMRYFSTSVSRPGSGEPRFIAVGYVDDTQFVRFDSDAASQRMEPRAPWIEQERPEYWDQETRNVKAHSQTDRENLGTLRGYYNQSEAGSHTIQIMYGCDVGSDGRFLRGYEQHAYDGKDYIALNEDLRSWTAADMAAQITQRKWEAARRAEQLRAYLEGTCVEWLRRYLENGKETLQRTDPPKTHMTHHPISDHEATLRCWALGFYPAEITLTWQRDGEDQTQDTELVETRPAGDGTFQKWAAVVVPSGEEQRYTCHVQHEGLPKPLTLRWELSS

SEQ ID NO: 136 - protein, 278 aa, Artificial Sequence
  Description of Artificial Sequence: Synthetic polypeptide
  HLA-B*42:01 soluble
GSHSMRYFYTSVSRPGRGEPRFISVGYVDDTQFVRFDSDAASPREEPRAPWIEQEGPEYWDRNTQIYKAQAQTDRESLRNLRGYYNQSEAGSHTLQSMYGCDVGPDGRLLRGHNQYAYDGKDYIALNEDLRSWTAADTAAQITQRKWEAARVAEQDRAYLEGTCVEWLRRYLENGKDTLERADPPKTHVTHHPISDHEATLRCWALGFYPAEITLTWQRDGEDQTQDTELVETRPAGDRTFQKWAAVVVPSGEEQRYTCHVQHEGLPKPLTLRWEPSS

SEQ ID NO: 137 - protein, 278 aa, Artificial Sequence
  Description of Artificial Sequence: Synthetic polypeptide
  HLA-C*17:01 soluble
GSHSMRYFYTAVSRPGRGEPRFIAVGYVDDTQFVRFDSDAASPRGEPRAPWVEQEGPEYWDRETQKYKRQAQADRVNLRKLRGYYNQSEAGSHTIQRMYGCDLGPDGRLLRGYNQFAYDGKDYIALNEDLRSWTAADTAAQISQRKLEAAREAEQLRAYLEGECVEWLRGYLENGKETLQRAERPKTHVTHHPVSDHEATLRCWALGFYPAEITLTWQRDGEDQTQDTELVETRPAGDGTFQKWAAVVVPSGQEQRYTCHVQHEGLQEPCTLRWKPSS

SEQ ID NO: 138 - protein, 278 aa, Artificial Sequence
  Description of Artificial Sequence: Synthetic polypeptide
  HLA-B*35:02 soluble
GSHSMRYFYTAMSRPGRGEPRFIAVGYVDDTQFVRFDSDAASPRTEPRAPWIEQEGPEYWDRNTQIFKTNTQTYRESLRNLRGYYNQSEAGSHIIQRMYGCDLGPDGRFLRGHNQYAYDGKDYIALNEDLSSWTAADTAAQITQRKWEAARVAEQLRAYLEGLCVEWLRRYLENGKETLQRADPPKTHVTHHPVSDHEATLRCWALGFYPAEITLTWQRDGEDQTQDTELVETRPAGDRTFQKWAAVVVPSGEEQRYTCHVQHEGLPKPLTLRWEPSS

SEQ ID NO: 139 - protein, 278 aa, Artificial Sequence
  Description of Artificial Sequence: Synthetic polypeptide
  HLA-B*39:06 soluble
GSHSMRYFYTSVSRPGRGEPRFISVGYVDDTQFVRFDSDAASPREEPRAPWIEQEGPEYWDRNTQICKTNTQTDRESLRNLRGYYNQSEAGSHTWQTMYGCDVGPDGRLLRGHNQFAYDGKDYIALNEDLSSWTAADTAAQITQRKWEAARVAEQLRTYLEGTCVEWLRRYLENGKETLQRADPPKTHVTHHPISDHEATLRCWALGFYPAEITLTWQRDGEDQTQDTELVETRPAGDRTFQKWAAVVVPSGEEQRYTCHVQHEGLPKPLTLRWEPSS

SEQ ID NO: 140 - protein, 278 aa, Artificial Sequence
  Description of Artificial Sequence: Synthetic polypeptide
  HLA-C*03:02 soluble
GSHSMRYFYTAVSRPGRGEPHFIAVGYVDDTQFVRFDSDAASPRGEPRAPWVEQEGPEYWDRETQKYKRQAQTDRVSLRNLRGYYNQSEAGSHILQRMYGCDVGPDGRLLRGYDQSAYDGKDYIALNEDLRSWTAADTAAQITQRKWEAAREAEQLRAYLEGLCVEWLRRYLKNGKETLQRAEHPKTHVTHHPVSDHEATLRCWALGFYPAEITLTWQWDGEDQTQDTELVETRPAGDGTFQKWAAVVVPSGEEQRYTCHVQHEGLPEPLTLRWEPSS

SEQ ID NO: 141 - protein, 278 aa, Artificial Sequence
  Description of Artificial Sequence: Synthetic polypeptide
  HLA-B*58:01 soluble
GSHSMRYFYTAMSRPGRGEPRFIAVGYVDDTQFVRFDSDAASPRTEPRAPWIEQEGPEYWDGETRNMKASAQTYRENLRIALRYYNQSEAGSHIIQRMYGCDLGPDGRLLRGHDQSAYDGKDYIALNEDLSSWTAADTAAQITQRKWEAARVAEQLRAYLEGLCVEWLRRYLENGKETLQRADPPKTHVTHHPVSDHEATLRCWALGFYPAEITLTWQRDGEDQTQDTELVETRPAGDRTFQKWAAVVVPSGEEQRYTCHVQHEGLPKPLTLRWEPSS

SEQ ID NO: 142 - protein, 278 aa, Artificial Sequence
  Description of Artificial Sequence: Synthetic polypeptide
  HLA-A*33:03 soluble
GSHSMRYFTTSVSRPGRGEPRFIAVGYVDDTQFVRFDSDAASQRMEPRAPWIEQEGPEYWDRNTRNVKAHSQIDRVDLGTLRGYYNQSEAGSHTIQMMYGCDVGSDGRFLRGYQQDAYDGKDYIALNEDLRSWTAADMAAQITQRKWEAARVAEQLRAYLEGTCVEWLRRYLENGKETLQRTDPPKTHMTHHAVSDHEATLRCWALSFYPAEITLTWQRDGEDQTQDTELVETRPAGDGTFQKWASVVVPSGQEQRYTCHVQHEGLPKPLTLRWEPSS

SEQ ID NO: 143 - protein, 278 aa, Artificial Sequence
  Description of Artificial Sequence: Synthetic polypeptide
  HLA-A*68:02 soluble
GSHSMRYFYTSMSRPGRGEPRFIAVGYVDDTQFVRFDSDAASQRMEPRAPWIEQEGPEYWDRNTRNVKAQSQTDRVDLGTLRGYYNQSEAGSHTIQRMYGCDVGPDGRFLRGYHQYAYDGKDYIALKEDLRSWTAADMAAQTTKHKWEAAHVAEQWRAYLEGTCVEWLRRYLENGKETLQRTDAPKTHMTHHAVSDHEATLRCWALSFYPAEITLTWQRDGEDQTQDTELVETRPAGDGTFQKWVAVVVPSGQEQRYTCHVQHEGLPKPLTLRWEPSS

SEQ ID NO: 144 - protein, 278 aa, Artificial Sequence
  Description of Artificial Sequence: Synthetic polypeptide
  HLA-C*01:02 soluble
CSHSMKYFFTSVSRPGRGEPRFISVGYVDDTQFVRFDSDAASPRGEPRAPWVEQEGPEYWDRETQKYKRQAQTDRVSLRNLRGYYNQSEAGSHTLQWMCGCDLGPDGRLLRGYDQYAYDGKDYIALNEDLRSWTAADTAAQITQRKWEAAREAEQRRAYLEGTCVEWLRRYLENGKETLQRAEHPKTHVTHHPVSDHEATLRCWALGFYPAEITLTWQWDGEDQTQDTELVETRPAGDGTFQKWAAVMVPSGEEQRYTCHVQHEGLPEPLTLRWEPSS

SEQ ID NO: 145 - protein, 278 aa, Artificial Sequence
  Description of Artificial Sequence: Synthetic polypeptide
  HLA-C*07:04 soluble
CSHSMRYFDTAVSRPGRGEPRFISVGYVDDTQFVRFDSDAASPRGEPRAPWVEQEGPEYWDRETQKYKRQAQADRVSLRNLRGYYNQSEDGSHTFQRMYGCDLGPDGRLLRGYDQFAYDGKDYIALNEDLRSWTAADTAAQITQRKLEAARAAEQDRAYLEGTCVEWLRRYLENGKKTLQRAEPPKTHVTHHPLSDHEATLRCWALGFYPAEITLTWQRDGEDQTQDTELVETRPAGDGTFQKWAAVVVPSGQEQRYTCHMQHEGLQEPLTLSWEPSS

SEQ ID NO: 146 - protein, 278 aa, Artificial Sequence
  Description of Artificial Sequence: Synthetic polypeptide
  HLA-A*68:01 soluble
GSHSMRYFYTSVSRPGRGEPRFIAVGYVDDTQFVRFDSDAASQRMEPRAPWIEQEGPEYWDRNTRNVKAQSQTDRVDLGTLRGYYNQSEAGSHTIQMMYGCDVGSDGRFLRGYRQDAYDGKDYIALKEDLRSWTAADMAAQTTKHKWEAAHVAEQWRAYLEGTCVEWLRRYLENGKETLQRTDAPKTHMTHHAVSDHEATLRCWALSFYPAEITLTWQRDGEDQTQDTELVETRPAGDGTFQKWVAVVVPSGQEQRYTCHVQHEGLPKPLTLRWEPSS

SEQ ID NO: 147 - protein, 278 aa, Artificial Sequence
  Description of Artificial Sequence: Synthetic polypeptide
  HLA-A*32:01 soluble
GSHSMRYFFTSVSRPGRGEPRFIAVGYVDDTQFVRFDSDAASQRMEPRAPWIEQEGPEYWDQETRNVKAHSQTDRESLRIALRYYNQSEAGSHTIQMMYGCDVGPDGRLLRGYQQDAYDGKDYIALNEDLRSWTAADMAAQITQRKWEAARVAEQLRAYLEGTCVEWLRRYLENGKETLQRTDAPKTHMTHHAVSDHEATLRCWALSFYPAEITLTWQRDGEDQTQDTELVETRPAGDGTFQKWASVVVPSGQEQRYTCHVQHEGLPKPLTLRWEPSS

SEQ ID NO: 148 - protein, 278 aa, Artificial Sequence
  Description of Artificial Sequence: Synthetic polypeptide
  HLA-B*49:01 soluble
GSHSMRYFHTAMSRPGRGEPRFITVGYVDDTLFVRFDSDATSPRKEPRAPWIEQEGPEYWDRETQISKTNTQTYRENLRIALRYYNQSEAGSHTWQRMYGCDLGPDGRLLRGYNQLAYDGKDYIALNEDLSSWTAADTAAQITQRKWEAAREAEQLRAYLEGLCVEWLRRYLENGKETLQRADPPKTHVTHHPISDHEATLRCWALGFYPAEITLTWQRDGEDQTQDTELVETRPAGDRTFQKWAAVVVPSGEEQRYTCHVQHEGLPKPLTLRWEPSS

SEQ ID NO: 149 - protein, 278 aa, Artificial Sequence
  Description of Artificial Sequence: Synthetic polypeptide
  HLA-B*53:01 soluble
GSHSMRYFYTAMSRPGRGEPRFIAVGYVDDTQFVRFDSDAASPRTEPRAPWIEQEGPEYWDRNTQIFKTNTQTYRENLRIALRYYNQSEAGSHIIQRMYGCDLGPDGRLLRGHDQSAYDGKDYIALNEDLSSWTAADTAAQITQRKWEAARVAEQLRAYLEGLCVEWLRRYLENGKETLQRADPPKTHVTHHPVSDHEATLRCWALGFYPAEITLTWQRDGEDQTQDTELVETRPAGDRTFQKWAAVVVPSGEEQRYTCHVQHEGLPKPLTLRWEPSS

SEQ ID NO: 150 - protein, 278 aa, Artificial Sequence
  Description of Artificial Sequence: Synthetic polypeptide
  HLA-B*50:01 soluble
GSHSMRYFHTAMSRPGRGEPRFITVGYVDDTLFVRFDSDATSPRKEPRAPWIEQEGPEYWDRETQISKTNTQTYRESLRNLRGYYNQSEAGSHTWQRMYGCDLGPDGRLLRGYNQLAYDGKDYIALNEDLSSWTAADTAAQITQRKWEAAREAEQLRAYLEGLCVEWLRRYLENGKETLQRADPPKTHVTHHPISDHEATLRCWALGFYPAEITLTWQRDGEDQTQDTELVETRPAGDRTFQKWAAVVVPSGEEQRYTCHVQHEGLPKPLTLRWEPSS

SEQ ID NO: 151 - protein, 278 aa, Artificial Sequence
  Description of Artificial Sequence: Synthetic polypeptide
  HLA-A*02:05 soluble
GSHSMRYFYTSVSRPGRGEPRFIAVGYVDDTQFVRFDSDAASRRMEPRAPWIEQEGPEYWDGETRKVKAHSQTHRVDLGTLRGYYNQSEAGSHTLQRMYGCDVGSDWRFLRGYHQYAYDGKDYIALKEDLRSWTAADMAAQTTKHKWEAAHVAEQWRAYLEGTCVEWLRRYLENGKETLQRTDAPKTHMTHHAVSDHEATLRCWALSFYPAEITLTWQRDGEDQTQDTELVETRPAGDGTFQKWAAVVVPSGQEQRYTCHVQHEGLPKPLTLRWEPSS

SEQ ID NO: 152 - protein, 278 aa, Artificial Sequence
  Description of Artificial Sequence: Synthetic polypeptide
  HLA-B*55:01 soluble
GSHSMRYFYTAMSRPGRGEPRFIAVGYVDDTQFVRFDSDAASPREEPRAPWIEQEGPEYWDRNTQIYKAQAQTDRESLRNLRGYYNQSEAGSHTWQTMYGCDLGPDGRLLRGHNQLAYDGKDYIALNEDLSSWTAADTAAQITQRKWEAAREAEQLRAYLEGTCVEWLRRYLENGKETLQRADPPKTHVTHHPISDHEATLRCWALGFYPAEITLTWQRDGEDQTQDTELVETRPAGDRTFQKWAAVVVPSGEEQRYTCHVQHEGLPKPLTLRWEPSS

SEQ ID NO: 153 - protein, 278 aa, Artificial Sequence
  Description of Artificial Sequence: Synthetic polypeptide
  HLA-B*45:01 soluble
GSHSMRYFHTAMSRPGRGEPRFITVGYVDDTLFVRFDSDATSPRKEPRAPWIEQEGPEYWDRETQISKTNTQTYRESLRNLRGYYNQSEAGSHTWQRMYGCDLGPDGRLLRGYNQLAYDGKDYIALNEDLSSWTAADTAAQITQRKWEAARVAEQDRAYLEGLCVESLRRYLENGKETLQRADPPKTHVTHHPISDHEATLRCWALGFYPAEITLTWQRDGEDQTQDTELVETRPAGDRTFQKWAAVVVPSGEEQRYTCHVQHEGLPKPLTLRWEPSS

SEQ ID NO: 154 - protein, 278 aa, Artificial Sequence
  Description of Artificial Sequence: Synthetic polypeptide
  HLA-B*52:01 soluble
GSHSMRYFYTAMSRPGRGEPRFIAVGYVDDTQFVRFDSDAASPRTEPRAPWIEQEGPEYWDRETQISKTNTQTYRENLRIALRYYNQSEAGSHTWQTMYGCDVGPDGRLLRGHNQYAYDGKDYIALNEDLSSWTAADTAAQITQRKWEAAREAEQLRAYLEGLCVEWLRRHLENGKETLQRADPPKTHVTHHPVSDHEATLRCWALGFYPAEITLTWQRDGEDQTQDTELVETRPAGDRTFQKWAAVVVPSGEEQRYTCHVQHEGLPKPLTLRWEPSS

SEQ ID NO: 155 - protein, 278 aa, Artificial Sequence
  Description of Artificial Sequence: Synthetic polypeptide
  HLA-C*12:02 soluble
CSHSMRYFYTAVSRPGRGEPRFIAVGYVDDTQFVRFDSDAASPRGEPRAPWVEQEGPEYWDRETQKYKRQAQADRVSLRNLRGYYNQSEAGSHTLQRMYGCDLGPDGRLLRGYDQSAYDGKDYIALNEDLRSWTAADTAAQITQRKWEAAREAEQWRAYLEGTCVEWLRRYLENGKETLQRAEHPKTHVTHHPVSDHEATLRCWALGFYPAEITLTWQRDGEDQTQDTELVETRPAGDGTFQKWAAVVVPSGEEQRYTCHVQHEGLPEPLTLRWEPSS

SEQ ID NO: 156 - protein, 278 aa, Artificial Sequence
  Description of Artificial Sequence: Synthetic polypeptide
  HLA-B*35:03 soluble
GSHSMRYFYTAMSRPGRGEPRFIAVGYVDDTQFVRFDSDAASPRTEPRAPWIEQEGPEYWDRNTQIFKTNTQTYRESLRNLRGYYNQSEAGSHIIQRMYGCDLGPDGRLLRGHDQFAYDGKDYIALNEDLSSWTAADTAAQITQRKWEAARVAEQLRAYLEGLCVEWLRRYLENGKETLQRADPPKTHVTHHPVSDHEATLRCWALGFYPAEITLTWQRDGEDQTQDTELVETRPAGDRTFQKWAAVVVPSGEEQRYTCHVQHEGLPKPLTLRWEPSS

SEQ ID NO: 157 - protein, 278 aa, Artificial Sequence
  Description of Artificial Sequence: Synthetic polypeptide
  HLA-B*40:02 soluble
GSHSMRYFHTSVSRPGRGEPRFITVGYVDDTLFVRFDSDATSPRKEPRAPWIEQEGPEYWDRETQISKTNTQTYRESLRNLRGYYNQSEAGSHTLQSMYGCDVGPDGRLLRGHNQYAYDGKDYIALNEDLRSWTAADTAAQITQRKWEAARVAEQLRAYLEGECVEWLRRYLENGKETLQRADPPKTHVTHHPISDHEATLRCWALGFYPAEITLTWQRDGEDQTQDTELVETRPAGDRTFQKWAAVVVPSGEEQRYTCHVQHEGLPKPLTLRWEPSS

SEQ ID NO: 158 - protein, 278 aa, Artificial Sequence
  Description of Artificial Sequence: Synthetic polypeptide
  HLA-B*15:03 soluble
GSHSMRYFYTAMSRPGRGEPRFISVGYVDDTQFVRFDSDAASPREEPRAPWIEQEGPEYWDRETQISKTNTQTYRESLRNLRGYYNQSEAGSHTLQRMYGCDVGPDGRLLRGHDQSAYDGKDYIALNEDLSSWTAADTAAQITQRKWEAAREAEQLRAYLEGLCVEWLRRYLENGKETLQRADPPKTHVTHHPISDHEATLRCWALGFYPAEITLTWQRDGEDQTQDTELVETRPAGDRTFQKWAAVVVPSGEEQRYTCHVQHEGLPKPLTLRWEPSS

SEQ ID NO: 159 - protein, 278 aa, Artificial Sequence
  Description of Artificial Sequence: Synthetic polypeptide
  HLA-A*74:01 soluble
GSHSMRYFFTSVSRPGRGEPRFIAVGYVDDTQFVRFDSDAASQRMEPRAPWIEQEGPEYWDQETRNVKAHSQTDRVDLGTLRGYYNQSEAGSHTIQMMYGCDVGPDGRLLRGYQQDAYDGKDYIALNEDLRSWTAADMAAQITQRKWEAARVAEQLRAYLEGTCVEWLRRYLENGKETLQRTDAPKTHMTHHAVSDHEATLRCWALSFYPAEITLTWQRDGEDQTQDTELVETRPAGDGTFQKWASVVVPSGQEQRYTCHVQHEGLPKPLTLRWEPSS

SEQ ID NO: 160 - protein, 119 aa, Homo sapiens
  full length human beta-2-microglobulin
MSRSVALAVLALLSLSGLEAIQRTPKIQVYSRHPAENGKSNFLNCYVSGFHPSDIEVDLLKNGERIEKVEHSDLSFSKDWSFYLLYYTEFTPTEKDEYACRVNHVTLSQPKIVKWDRDM

SEQ ID NO: 161 - protein, 40 aa, Artificial Sequence
  Description of Artificial Sequence: Synthetic polypeptide
  Avitag sequence with His6 tag and Flag tag
GSGSAGGGLNDIFEAQKIEWHEGSTGHHHHHHDYKDDDDK

SEQ ID NO: 162 - protein, 26 aa, Artificial Sequence
  Description of Artificial Sequence: Synthetic peptide
  Sortag sequence with His6 tag
GSGSAGGSGSGGGSLPETGGHHHHHH

SEQ ID NO: 163 - protein, 5 aa, Artificial Sequence
  Description of Artificial Sequence: Synthetic peptide
  sortag motif
  MOD_RES (3)..(3): Any amino acid
LPXTG

SEQ ID NO: 164 - protein, 5 aa, Artificial Sequence
  Description of Artificial Sequence: Synthetic peptide
  sortag motif
IPKTG

SEQ ID NO: 165 - protein, 5 aa, Artificial Sequence
  Description of Artificial Sequence: Synthetic peptide
  sortag motif
  MOD_RES (3)..(3): Any amino acid
MPXTG

SEQ ID NO: 166 - protein, 5 aa, Artificial Sequence
  Description of Artificial Sequence: Synthetic peptide
  sortag motif
LAETG

SEQ ID NO: 167 - protein, 5 aa, Artificial Sequence
  Description of Artificial Sequence: Synthetic peptide
  sortag motif
  MOD_RES (3)..(3): Any amino acid
LPXAG

SEQ ID NO: 168 - protein, 5 aa, Artificial Sequence
  Description of Artificial Sequence: Synthetic peptide
  sortag motif
LPESG

SEQ ID NO: 169 - protein, 5 aa, Artificial Sequence
  Description of Artificial Sequence: Synthetic peptide
  sortag motif
LPELG

SEQ ID NO: 170 - protein, 5 aa, Artificial Sequence
  Description of Artificial Sequence: Synthetic peptide
  sortag motif
LPEVG

SEQ ID NO: 171 - protein, 5 aa, Artificial Sequence
  Description of Artificial Sequence: Synthetic peptide
  sortag motif
  MOD_RES (1)..(1): Any amino acid
XPKTG

SEQ ID NO: 172 - protein, 5 aa, Artificial Sequence
  Description of Artificial Sequence: Synthetic peptide
  sortag motif
APKTG

SEQ ID NO: 173 - protein, 5 aa, Artificial Sequence
  Description of Artificial Sequence: Synthetic peptide
  sortag motif
DPKTG

SEQ ID NO: 174 - protein, 5 aa, Artificial Sequence
  Description of Artificial Sequence: Synthetic peptide
  sortag motif
SPKTG

SEQ ID NO: 175 - protein, 5 aa, Artificial Sequence
  Description of Artificial Sequence: Synthetic peptide
  sortag motif
  MOD_RES (4)..(4): Any amino acid
LPEXG

SEQ ID NO: 176 - protein, 5 aa, Artificial Sequence
  Description of Artificial Sequence: Synthetic peptide
  sortag motif
LPEAG

SEQ ID NO: 177 - protein, 5 aa, Artificial Sequence
  Description of Artificial Sequence: Synthetic peptide
  sortag motif
LPECG

SEQ ID NO: 178 - protein, 5 aa, Artificial Sequence
  Description of Artificial Sequence: Synthetic peptide
  sortag motif
  MOD_RES (4)..(4): A, C or S
LPEXG

SEQ ID NO: 179 - protein, 5 aa, Artificial Sequence
  Description of Artificial Sequence: Synthetic peptide
  ligation control motif
WTWTW

SEQ ID NO: 180 - protein, 193 aa, Artificial Sequence
  Description of Artificial Sequence: Synthetic polypeptide
  N-intein sequence with Flag tag
GSGSAGGSFESGPGAEYCFNVDDPSKDSKAQVSAAEAGITGTWYNQLGSTFIVTAGADGALTGTYESAVGNAESRYVLTGRYDSAPATDGSGTALGWTVAWKNNYRNAHSATTWSGQYVGGAEARINTQWLLTSGTTEANAWKSTLVGHDTFTKVKPSAASIDAAKKAGVNNGNPLDAVQQGSTGDYKDDDDK

SEQ ID NO: 181 - protein, 30 aa, Artificial Sequence
  Description of Artificial Sequence: Synthetic polypeptide
  linker
  SITE (1)..(30): This sequence may encompass 1-6 "Gly Gly Gly Gly Ser" repeating units
GGGGSGGGGSGGGGSGGGGSGGGGSGGGGS

SEQ ID NO: 182 - protein, 13 aa, Artificial Sequence
  Description of Artificial Sequence: Synthetic peptide
  linker
SSSSGSSSSGSAA

SEQ ID NO: 183 - protein, 5 aa, Artificial Sequence
  Description of Artificial Sequence: Synthetic peptide
  linker
GGGGG

SEQ ID NO: 184 - protein, 51 aa, Artificial Sequence
  Description of Artificial Sequence: Synthetic polypeptide
  linker
  SITE (2)..(51): This region may encompass 1-10 "Gly Gly Gly Gly Ser" repeating units
SGGGGSGGGGSGGGGSGGGGSGGGGSGGGGSGGGGSGGGGSGGGGSGGGGS

SEQ ID NO: 185 - protein, 20 aa, Artificial Sequence
  Description of Artificial Sequence: Synthetic peptide
  linker
  SITE (1)..(20): This sequence may encompass 1-5 "Gly Gly Ser Gly" repeating units
GGSGGGSGGGSGGGSGGGSG

SEQ ID NO: 186 - protein, 4 aa, Artificial Sequence
  Description of Artificial Sequence: Synthetic peptide
  linker
GSAT

SEQ ID NO: 187 - protein, 30 aa, Artificial Sequence
  Description of Artificial Sequence: Synthetic polypeptide
  linker
  SITE (1)..(30): This sequence may encompass 1-5 "Gly Gly Ser Gly Gly Ser" repeating units
GGSGGSGGSGGSGGSGGSGGSGGSGGSGGS

SEQ ID NO: 188 - protein, 5 aa, Artificial Sequence
  Description of Artificial Sequence: Synthetic peptide
  enterokinase cleavage site
DDDDK

SEQ ID NO: 189 - protein, 16 aa, Artificial Sequence
  Description of Artificial Sequence: Synthetic peptide
  CLIP peptide
KPVSKMRMATPLLMQA

SEQ ID NO: 190 - protein, 15 aa, Artificial Sequence
  Description of Artificial Sequence: Synthetic peptide
  TT p2 peptide
QIYKANSKFIGITEL

SEQ ID NO: 191 - protein, 208 aa, Artificial Sequence
  Description of Artificial Sequence: Synthetic polypeptide
  HLA-DRA*01:01 Myc tag and Sorttag
IKEEHVIIQAEFYLNPDQSGEFMFDFDGDEIFHVDMAKKETVWRLEEFGRFASFEAQGALANIAVDKANLEIMTKRSNYTPITNVPPEVTVLTNSPVELREPNVLICFIDKFTPPVVNVTWLRNGKPVTTGVSETVFLPREDHLFRKFHYLPFLPSTEDVYDCRVEHWGLDEPLLKHWEFDAPSPLPETTEGSEQKLISEEDLPETGG

SEQ ID NO: 192 - protein, 252 aa, Artificial Sequence
  Description of Artificial Sequence: Synthetic polypeptide
  HLA-DRB1*01:01 with N-terminal CLIP peptide, digestible linker and C-terminal AviTag and His6 tag
KPVSKMRMATPLLMQAGGGGSIEGRGSGGGSGDTRPRFLWQLKFECHFFNGTERVRLLERCIYNQEESVRFDSDVGEYRAVTELGRPDAEYWNSQKDLLEQRRAAVDTYCRHNYGVGESFTVQRRVEPKVTVYPSKTQPLQHHNLLVCSVSGFYPGSIEVRWFRNGQEEKAGVVSTGLIQNGDWTFQTLVMLETVPRSGEVYTCQVEHPSVTSPLTVEWRARSESAQSKLGGLNDIFEAQKIEWHEHHHHHH

SEQ ID NO: 193 - protein, 13 aa, Artificial Sequence
  Description of Artificial Sequence: Synthetic peptide
  HA peptide from Influenza A virus
PKYVKQNTLKLAT

SEQ ID NO: 194 - protein, 254 aa, Homo sapiens
  HLA-DRA*01:01 full-length
MAISGVPVLGFFIIAVLMSAQESWAIKEEHVIIQAEFYLNPDQSGEFMFDFDGDEIFHVDMAKKETVWRLEEFGRFASFEAQGALANIAVDKANLEIMTKRSNYTPITNVPPEVTVLTNSPVELREPNVLICFIDKFTPPVVNVTWLRNGKPVTTGVSETVFLPREDHLFRKFHYLPFLPSTEDVYDCRVEHWGLDEPLLKHWEFDAPSPLPETTENVVCALGLTVGLVGIIIGTIFIIKGVRKSNAAERRGPL

SEQ ID NO: 195 - protein, 266 aa, Homo sapiens
  HLA-DRB1*01:01 full-length
MVCLKLPGGSCMTALTVTLMVLSSPLALAGDTRPRFLWQLKFECHFFNGTERVRLLERCIYNQEESVRFDSDVGEYRAVTELGRPDAEYWNSQKDLLEQRRAAVDTYCRHNYGVGESFTVQRRVEPKVTVYPSKTQPLQHHNLLVCSVSGFYPGSIEVRWFRNGQEEKAGVVSTGLIQNGDWTFQTLVMLETVPRSGEVYTCQVEHPSVTSPLTVEWRARSESAQSKMLSGVGGFVLGLLFLGAGLFIYFRNQKGHSGLQPTGFLS

SEQ ID NO: 196 - protein, 266 aa, Homo sapiens [sequence omitted]

SEQ ID NO: 197 - protein, 266 aa, Homo sapiens
  HLA-DRB1*03:01 full-length
MVCLRLPGGSCMAVLTVTLMVLSSPLALAGDTRPRFLEYSTSECHFFNGTERVRYLDRYFHNQEENVRFDSDVGEFRAVTELGRPDAEYWNSQKDLLEQKRGRVDNYCRHNYGVVESFTVQRRVHPKVTVYPSKTQPLQHHNLLVCSVSGFYPGSIEVRWFRNGQEEKTGVVSTGLIHNGDWTFQTLVMLETVPRSGEVYTCQVEHPSVTSPLTVEWRARSESAQSKMLSGVGGFVLGLLFLGAGLFIYFRNQKGHSGLQPRGFLS

SEQ ID NO: 198 - protein, 266 aa, Homo sapiens [sequence omitted]

SEQ ID NO: 199 - protein, 266 aa, Homo sapiens [sequence omitted]

SEQ ID NO: 200 - protein, 266 aa, Homo sapiens
  HLA-DRB1*07:01 full-length
MVCLKLPGGSCMAALTVTLMVLSSPLALAGDTQPRFLWQGKYKCHFFNGTERVQFLERLFYNQEEFVRFDSDVGEYRAVTELGRPVAESWNSQKDILEDRRGQVDTVCRHNYGVGESFTVQRRVHPEVTVYPAKTQPLQHHNLLVCSVSGFYPGSIEVRWFRNGQEEKAGVVSTGLIQNGDWTFQTLVMLETVPRSGEVYTCQVEHPSVMSPLTVEWRARSESAQSKMLSGVGGFVLGLLFLGAGLFIYFRNQKGHSGLQPTGFLS

SEQ ID NO: 201 - protein, 266 aa, Homo sapiens [sequence omitted]

SEQ ID NO: 202 - protein, 266 aa, Homo sapiens [sequence omitted]

SEQ ID NO: 203 - protein, 266 aa, Homo sapiens [sequence omitted]

SEQ ID NO: 204 - protein, 266 aa, Homo sapiens [sequence omitted]

SEQ ID NO: 205 - protein, 266 aa, Homo sapiens [sequence omitted]

SEQ ID NO: 206 - protein, 266 aa, Homo sapiens [sequence omitted]

SEQ ID NO: 207 - protein, 266 aa, Homo sapiens [sequence omitted]

SEQ ID NO: 208 - protein, 266 aa, Homo sapiens
  HLA-DRB1*15:01 full-length
MVCLKLPGGSCMTALTVTLMVLSSPLALSGDTRPRFLWQPKRECHFFNGTERVRFLDRYFYNQEESVRFDSDVGEFRAVTELGRPDAEYWNSQKDILEQARAAVDTYCRHNYGVVESFTVQRRVQPKVTVYPSKTQPLQHHNLLVCSVSGFYPGSIEVRWFLNGQEEKAGMVSTGLIQNGDWTFQTLVMLETVPRSGEVYTCQVEHPSVTSPLTVEWRARSESAQSKMLSGVGGFVLGLLFLGAGLFIYFRNQKGHSGLQPTGFLS

SEQ ID NO: 209 - protein, 266 aa, Homo sapiens [sequence omitted]

SEQ ID NO: 210 - protein, 255 aa, Homo sapiens [sequence omitted]

SEQ ID NO: 211 - protein, 261 aa, Homo sapiens [sequence omitted]

SEQ ID NO: 212 - protein, 255 aa, Homo sapiens
  HLA-DQA1*01:02 full-length
MILNKALLLGALALTTVMSPCGGEDIVADHVASCGVNLYQFYGPSGQYTHEFDGDEQFYVDLERKETAWRWPEFSKFGGFDPQGALRNMAVAKHNLNIMIKRYNSTAATNEVPEVTVFSKSPVTLGQPNTLICLVDNIFPPVVNITWLSNGQSVTEGVSETSFLSKSDHSFFKISYLTFLPSADEIYDCKVEHWGLDQPLLKHWEPEIPAPMSELTETVVCALGLSVGLMGIVVGTVFIIQGLRSVGASRHQGPL

SEQ ID NO: 213 - protein, 261 aa, Homo sapiens
  HLA-DQB1*06:02 full-length
MSWKKALRIPGDLRVATVTLMLAMLSSLLAEGRDSPEDFVFQFKGMCYFTNGTERVRLVTRYIYNREEYARFDSDVGVYRAVTPQGRPDAEYWNSQKEVLEGTRAELDTVCRHNYEVAFRGILQRRVEPTVTISPSRTEALNHHNLLVCSVTDFYPGQIKVRWFRNDQEETAGVVSTPLIRNGDWTFQILVMLEMTPQRGDVYTCHVEHPSLQSPITVEWRAQSESAQSKMLSGVGGFVLGLIFLGLGLIIRQRSQKGLLH

SEQ ID NO: 214 - protein, 255 aa, Homo sapiens
  HLA-DQA1*03:01 full-length
MILNKALMLGALALTTVMSPCGGEDIVADHVASYGVNLYQSYGPSGQYSHEFDGDEEFYVDLERKETVWQLPLFRRFRRFDPQFALTNIAVLKHNLNIVIKRSNSTAATNEVPEVTVFSKSPVTLGQPNTLICLVDNIFPPVVNITWLSNGHSVTEGVSETSFLSKSDHSFFKISYLTFLPSADEIYDCKVEHWGLDEPLLKHWEPEIPTPMSELTETVVCALGLSVGLVGIVVGTVLIIRGLRSVGASRHQGPL

SEQ ID NO: 215 - protein, 261 aa, Homo sapiens [sequence omitted]

SEQ ID NO: 216 - protein, 254 aa, Homo sapiens
  HLA-DQA1*05:01 full-length
MILNKALMLGALALTTVMSPCGGEDIVADHVASYGVNLYQSYGPSGQYTHEFDGDEQFYVDLGRKETVWCLPVLRQFRFDPQFALTNIAVLKHNLNSLIKRSNSTAATNEVPEVTVFSKSPVTLGQPNILICLVDNIFPPVVNITWLSNGHSVTEGVSETSFLSKSDHSFFKISYLTLLPSAEESYDCKVEHWGLDKPLLKHWEPEIPAPMSELTETVVCALGLSVGLVGIVVGTVFIIRGLRSVGASRHQGPL

SEQ ID NO: 217 - protein, 261 aa, Homo sapiens
  HLA-DQB1*02:01 full-length
MSWKKALRIPGGLRAATVTLMLSMLSTPVAEGRDSPEDFVYQFKGMCYFTNGTERVRLVSRSIYNREEIVRFDSDVGEFRAVTLLGLPAAEYWNSQKDILERKRAAVDRVCRHNYQLELRTTLQRRVEPTVTISPSRTEALNHHNLLVCSVTDFYPAQIKVRWFRNDQEETAGVVSTPLIRNGDWTFQILVMLEMTPQRGDVYTCHVEHPSLQSPITVEWRAQSESAQSKMLSGIGGFVLGLIFLGLGLIIHHRSQKGLLH

SEQ ID NO: 218 - protein, 261 aa, Homo sapiens
  HLA-DQB1*03:01 full-length
MSWKKALRIPGGLRAATVTLMLAMLSTPVAEGRDSPEDFVYQFKAMCYFTNGTERVRYVTRYIYNREEYARFDSDVEVYRAVTPLGPPDAEYWNSQKEVLERTRAELDTVCRHNYQLELRTTLQRRVEPTVTISPSRTEALNHHNLLVCSVTDFYPAQIKVRWFRNDQEETTGVVSTPLIRNGDWTFQILVMLEMTPQHGDVYTCHVEHPSLQNPITVEWRAQSESAQSKMLSGIGGFVLGLIFLGLGLIIHHRSQKGLLH

SEQ ID NO: 219 - protein, 261 aa, Homo sapiens [sequence omitted]

SEQ ID NO: 220 - protein, 261 aa, Homo sapiens [sequence omitted]

SEQ ID NO: 221 - protein, 269 aa, Homo sapiens [sequence omitted]

SEQ ID NO: 222 - protein, 261 aa, Homo sapiens [sequence omitted]

SEQ ID NO: 223 - protein, 261 aa, Homo sapiens [sequence omitted]

SEQ ID NO: 224 - protein, 191 aa, Artificial Sequence
  Description of Artificial Sequence: Synthetic polypeptide
  HLA-DRA*01:01 soluble
IKEEHVIIQAEFYLNPDQSGEFMFDFDGDEIFHVDMAKKETVWRLEEFGRFASFEAQGALANIAVDKANLEIMTKRSNYTPITNVPPEVTVLTNSPVELREPNVLICFIDKFTPPVVNVTWLRNGKPVTTGVSETVFLPREDHLFRKFHYLPFLPSTEDVYDCRVEHWGLDEPLLKHWEFDAPSPLPETTE

SEQ ID NO: 225 - protein, 198 aa, Artificial Sequence
  Description of Artificial Sequence: Synthetic polypeptide
  HLA-DRB1*01:01 soluble
GDTRPRFLWQLKFECHFFNGTERVRLLERCIYNQEESVRFDSDVGEYRAVTELGRPDAEYWNSQKDLLEQRRAAVDTYCRHNYGVGESFTVQRRVEPKVTVYPSKTQPLQHHNLLVCSVSGFYPGSIEVRWFRNGQEEKAGVVSTGLIQNGDWTFQTLVMLETVPRSGEVYTCQVEHPSVTSPLTVEWRARSESAQSK

SEQ ID NO: 226 - protein, 198 aa, Artificial Sequence
  Description of Artificial Sequence: Synthetic polypeptide
  HLA-DRB1*01:02 soluble
GDTRPRFLWQLKFECHFFNGTERVRLLERCIYNQEESVRFDSDVGEYRAVTELGRPDAEYWNSQKDLLEQRRAAVDTYCRHNYGAVESFTVQRRVEPKVTVYPSKTQPLQHHNLLVCSVSGFYPGSIEVRWFRNGQEEKAGVVSTGLIQNGDWTFQTLVMLETVPRSGEVYTCQVEHPSVTSPLTVEWRARSESAQSK

SEQ ID NO: 227 - protein, 198 aa, Artificial Sequence
  Description of Artificial Sequence: Synthetic polypeptide
  HLA-DRB1*03:01 soluble
GDTRPRFLEYSTSECHFFNGTERVRYLDRYFHNQEENVRFDSDVGEFRAVTELGRPDAEYWNSQKDLLEQKRGRVDNYCRHNYGVVESFTVQRRVHPKVTVYPSKTQPLQHHNLLVCSVSGFYPGSIEVRWFRNGQEEKTGVVSTGLIHNGDWTFQTLVMLETVPRSGEVYTCQVEHPSVTSPLTVEWRARSESAQSK

SEQ ID NO: 228 - protein, 198 aa, Artificial Sequence
  Description of Artificial Sequence: Synthetic polypeptide
  HLA-DRB1*04:01 soluble
GDTRPRFLEQVKHECHFFNGTERVRFLDRYFYHQEEYVRFDSDVGEYRAVTELGRPDAEYWNSQKDLLEQKRAAVDTYCRHNYGVGESFTVQRRVYPEVTVYPAKTQPLQHHNLLVCSVNGFYPGSIEVRWFRNGQEEKTGVVSTGLIQNGDWTFQTLVMLETVPRSGEVYTCQVEHPSLTSPLTVEWRARSESAQSK

SEQ ID NO: 229 - protein, 198 aa, Artificial Sequence
  Description of Artificial Sequence: Synthetic polypeptide
  HLA-DRB1*04:04 soluble
GDTRPRFLEQVKHECHFFNGTERVRFLDRYFYHQEEYVRFDSDVGEYRAVTELGRPDAEYWNSQKDLLEQRRAAVDTYCRHNYGVVESFTVQRRVYPEVTVYPAKTQPLQHHNLLVCSVNGFYPGSIEVRWFRNGQEEKTGVVSTGLIQNGDWTFQTLVMLETVPRSGEVYTCQVEHPSLTSPLTVEWRARSESAQSK

SEQ ID NO: 230 - protein, 198 aa, Artificial Sequence
  Description of Artificial Sequence: Synthetic polypeptide
  HLA-DRB1*07:01 soluble
GDTQPRFLWQGKYKCHFFNGTERVQFLERLFYNQEEFVRFDSDVGEYRAVTELGRPVAESWNSQKDILEDRRGQVDTVCRHNYGVGESFTVQRRVHPEVTVYPAKTQPLQHHNLLVCSVSGFYPGSIEVRWFRNGQEEKAGVVSTGLIQNGDWTFQTLVMLETVPRSGEVYTCQVEHPSVMSPLTVEWRARSESAQSK

SEQ ID NO: 231 - protein, 198 aa, Artificial Sequence
  Description of Artificial Sequence: Synthetic polypeptide
  HLA-DRB1*08:01 soluble
GDTRPRFLEYSTGECYFFNGTERVRFLDRYFYNQEEYVRFDSDVGEYRAVTELGRPSAEYWNSQKDFLEDRRALVDTYCRHNYGVGESFTVQRRVHPKVTVYPSKTQPLQHHNLLVCSVSGFYPGSIEVRWFRNGQEEKTGVVSTGLIHNGDWTFQTLVMLETVPRSGEVYTCQVEHPSVTSPLTVEWSARSESAQSK

SEQ ID NO: 232 - protein, 198 aa, Artificial Sequence
  Description of Artificial Sequence: Synthetic polypeptide
  HLA-DRB1*10:01 soluble
GDTRPRFLEEVKFECHFFNGTERVRLLERRVHNQEEYARYDSDVGEYRAVTELGRPDAEYWNSQKDLLERRRAAVDTYCRHNYGVGESFTVQRRVQPKVTVYPSKTQPLQHHNLLVCSVNGFYPGSIEVRWFRNGQEEKTGVVSTGLIQNGDWTFQTLVMLETVPQSGEVYTCQVEHPSVMSPLTVEWRARSESAQSK

SEQ ID NO: 233 - protein, 198 aa, Artificial Sequence
  Description of Artificial Sequence: Synthetic polypeptide
  HLA-DRB1*11:01 soluble
GDTRPRFLEYSTSECHFFNGTERVRFLDRYFYNQEEYVRFDSDVGEFRAVTELGRPDEEYWNSQKDFLEDRRAAVDTYCRHNYGVGESFTVQRRVHPKVTVYPSKTQPLQHHNLLVCSVSGFYPGSIEVRWFRNGQEEKTGVVSTGLIHNGDWTFQTLVMLETVPRSGEVYTCQVEHPSVTSPLTVEWRARSESAQSK

SEQ ID NO: 234 - protein, 198 aa, Artificial Sequence
  Description of Artificial Sequence: Synthetic polypeptide
  HLA-DRB1*11:04 soluble
GDTRPRFLEYSTSECHFFNGTERVRFLDRYFYNQEEYVRFDSDVGEFRAVTELGRPDEEYWNSQKDFLEDRRAAVDTYCRHNYGVVESFTVQRRVHPKVTVYPSKTQPLQHHNLLVCSVSGFYPGSIEVRWFRNGQEEKTGVVSTGLIHNGDWTFQTLVMLETVPRSGEVYTCQVEHPSVTSPLTVEWRARSESAQSK

SEQ ID NO: 235 - protein, 198 aa, Artificial Sequence
  Description of Artificial Sequence: Synthetic polypeptide
  HLA-DRB1*13:01 soluble
GDTRPRFLEYSTSECHFFNGTERVRFLDRYFHNQEENVRFDSDVGEFRAVTELGRPDAEYWNSQKDILEDERAAVDTYCRHNYGVVESFTVQRRVHPKVTVYPSKTQPLQHHNLLVCSVSGFYPGSIEVRWFRNGQEEKTGVVSTGLIHNGDWTFQTLVMLETVPRSGEVYTCQVEHPSVTSPLTVEWRARSESAQSK

SEQ ID NO: 236 - protein, 198 aa, Artificial Sequence
  Description of Artificial Sequence: Synthetic polypeptide
  HLA-DRB1*13:02 soluble
GDTRPRFLEYSTSECHFFNGTERVRFLDRYFHNQEENVRFDSDVGEFRAVTELGRPDAEYWNSQKDILEDERAAVDTYCRHNYGVGESFTVQRRVHPKVTVYPSKTQPLQHHNLLVCSVSGFYPGSIEVRWFRNGQEEKTGVVSTGLIHNGDWTFQTLVMLETVPRSGEVYTCQVEHPSVTSPLTVEWRARSESAQSK

SEQ ID NO: 237 - protein, 198 aa, Artificial Sequence
  Description of Artificial Sequence: Synthetic polypeptide
  HLA-DRB1*14:01 soluble
GDTRPRFLEYSTSECHFFNGTERVRFLDRYFHNQEEFVRFDSDVGEYRAVTELGRPAAEHWNSQKDLLERRRAEVDTYCRHNYGVVESFTVQRRVHPKVTVYPSKTQPLQHYNLLVCSVSGFYPGSIEVRWFRNGQEEKTGVVSTGLIHNGDWTFQTLVMLETVPRSGEVYTCQVEHPSVTSPLTVEWRARSESAQSK

SEQ ID NO: 238 - protein, 198 aa, Artificial Sequence
  Description of Artificial Sequence: Synthetic polypeptide
  HLA-DRB1*15:01 soluble
GDTRPRFLWQPKRECHFFNGTERVRFLDRYFYNQEESVRFDSDVGEFRAVTELGRPDAEYWNSQKDILEQARAAVDTYCRHNYGVVESFTVQRRVQPKVTVYPSKTQPLQHHNLLVCSVSGFYPGSIEVRWFLNGQEEKAGMVSTGLIQNGDWTFQTLVMLETVPRSGEVYTCQVEHPSVTSPLTVEWRARSESAQSK

SEQ ID NO: 239 - protein, 198 aa, Artificial Sequence
  Description of Artificial Sequence: Synthetic polypeptide
  HLA-DRB1*15:03 soluble
GDTRPRFLWQPKRECHFFNGTERVRFLDRHFYNQEESVRFDSDVGEFRAVTELGRPDAEYWNSQKDILEQARAAVDTYCRHNYGVVESFTVQRRVQPKVTVYPSKTQPLQHHNLLVCSVSGFYPGSIEVRWFLNGQEEKAGMVSTGLIQNGDWTFQTLVMLETVPRSGEVYTCQVEHPSVTSPLTVEWRARSESAQSK

SEQ ID NO: 240 - protein, 195 aa, Artificial Sequence
  Description of Artificial Sequence: Synthetic polypeptide
  HLA-DQA1*01:01 soluble
EDIVADHVASCGVNLYQFYGPSGQYTHEFDGDEEFYVDLERKETAWRWPEFSKFGGFDPQGALRNMAVAKHNLNIMIKRYNSTAATNEVPEVTVFSKSPVTLGQPNTLICLVDNIFPPVVNITWLSNGQSVTEGVSETSFLSKSDHSFFKISYLTFLPSADEIYDCKVEHWGLDQPLLKHWEPEIPAPMSELTET

SEQ ID NO: 241 - protein, 199 aa, Artificial Sequence
  Description of Artificial Sequence: Synthetic polypeptide
  HLA-DQB1*05:01 soluble
GRDSPEDFVYQFKGLCYFTNGTERVRGVTRHIYNREEYVRFDSDVGVYRAVTPQGRPVAEYWNSQKEVLEGARASVDRVCRHNYEVAYRGILQRRVEPTVTISPSRTEALNHHNLLICSVTDFYPSQIKVRWFRNDQEETAGVVSTPLIRNGDWTFQILVMLEMTPQRGDVYTCHVEHPSLQSPITVEWRAQSESAQSK

SEQ ID NO: 242 - protein, 195 aa, Artificial Sequence
  Description of Artificial Sequence: Synthetic polypeptide
  HLA-DQA1*01:02 soluble
EDIVADHVASCGVNLYQFYGPSGQYTHEFDGDEQFYVDLERKETAWRWPEFSKFGGFDPQGALRNMAVAKHNLNIMIKRYNSTAATNEVPEVTVFSKSPVTLGQPNTLICLVDNIFPPVVNITWLSNGQSVTEGVSETSFLSKSDHSFFKISYLTFLPSADEIYDCKVEHWGLDQPLLKHWEPEIPAPMSELTET

SEQ ID NO: 243 - protein, 199 aa, Artificial Sequence
  Description of Artificial Sequence: Synthetic polypeptide
  HLA-DQB1*06:02 soluble
GRDSPEDFVFQFKGMCYFTNGTERVRLVTRYIYNREEYARFDSDVGVYRAVTPQGRPDAEYWNSQKEVLEGTRAELDTVCRHNYEVAFRGILQRRVEPTVTISPSRTEALNHHNLLVCSVTDFYPGQIKVRWFRNDQEETAGVVSTPLIRNGDWTFQILVMLEMTPQRGDVYTCHVEHPSLQSPITVEWRAQSESAQSK

SEQ ID NO: 244 - protein, 195 aa, Artificial Sequence
  Description of Artificial Sequence: Synthetic polypeptide
  HLA-DQA1*03:01 soluble
EDIVADHVASYGVNLYQSYGPSGQYSHEFDGDEEFYVDLERKETVWQLPLFRRFRRFDPQFALTNIAVLKHNLNIVIKRSNSTAATNEVPEVTVFSKSPVTLGQPNTLICLVDNIFPPVVNITWLSNGHSVTEGVSETSFLSKSDHSFFKISYLTFLPSADEIYDCKVEHWGLDEPLLKHWEPEIPTPMSELTET

SEQ ID NO: 245 - protein, 199 aa, Artificial Sequence
  Description of Artificial Sequence: Synthetic polypeptide
  HLA-DQB1*03:02 soluble
GRDSPEDFVYQFKGMCYFTNGTERVRLVTRYIYNREEYARFDSDVGVYRAVTPLGPPAAEYWNSQKEVLERTRAELDTVCRHNYQLELRTTLQRRVEPTVTISPSRTEALNHHNLLVCSVTDFYPAQIKVRWFRNDQEETTGVVSTPLIRNGDWTFQILVMLEMTPQRGDVYTCHVEHPSLQNPIIVEWRAQSESAQSK

SEQ ID NO: 246 - protein, 194 aa, Artificial Sequence
  Description of Artificial Sequence: Synthetic polypeptide
  HLA-DQA1*05:01 soluble
EDIVADHVASYGVNLYQSYGPSGQYTHEFDGDEQFYVDLGRKETVWCLPVLRQFRFDPQFALTNIAVLKHNLNSLIKRSNSTAATNEVPEVTVFSKSPVTLGQPNILICLVDNIFPPVVNITWLSNGHSVTEGVSETSFLSKSDHSFFKISYLTLLPSAEESYDCKVEHWGLDKPLLKHWEPEIPAPMSELTET

SEQ ID NO: 247 - protein, 199 aa, Artificial Sequence
  Description of Artificial Sequence: Synthetic polypeptide
  HLA-DQB1*02:01  soluble
GRDSPEDFVYQFKGMCYFTNGTERVRLVSRSIYNREEIVRFDSDVGEFRAVTLLGLPAAEYWNSQKDILERKRAAVDRVCRHNYQLELRTTLQRRVEPTVTISPSRTEALNHHNLLVCSVTDFYPAQIKVRWFRNDQEETAGVVSTPLIRNGDWTFQILVMLEMTPQRGDVYTCHVEHPSLQSPITVEWRAQSESAQSK

SEQ ID NO: 248 - protein, 199 aa, Artificial Sequence
  Description of Artificial Sequence: Synthetic polypeptide
  HLA-DQB1*03:01 soluble
GRDSPEDFVYQFKAMCYFTNGTERVRYVTRYIYNREEYARFDSDVEVYRAVTPLGPPDAEYWNSQKEVLERTRAELDTVCRHNYQLELRTTLQRRVEPTVTISPSRTEALNHHNLLVCSVTDFYPAQIKVRWFRNDQEETTGVVSTPLIRNGDWTFQILVMLEMTPQHGDVYTCHVEHPSLQNPITVEWRAQSESAQSK

SEQ ID NO: 249 - protein, 199 aa, Artificial Sequence
  Description of Artificial Sequence: Synthetic polypeptide
  HLA-DQB1*03:03 soluble
GRDSPEDFVYQFKGMCYFTNGTERVRLVTRYIYNREEYARFDSDVGVYRAVTPLGPPDAEYWNSQKEVLERTRAELDTVCRHNYQLELRTTLQRRVEPTVTISPSRTEALNHHNLLVCSVTDFYPAQIKVRWFRNDQEETTGVVSTPLIRNGDWTFQILVMLEMTPQRGDVYTCHVEHPSLQNPIIVEWRAQSESAQSK

SEQ ID NO: 250 - protein, 199 aa, Artificial Sequence
  Description of Artificial Sequence: Synthetic polypeptide
  HLA-DQB1*04:02 soluble
GRDSPEDFVFQFKGMCYFTNGTERVRGVTRYIYNREEYARFDSDVGVYRAVTPLGRLDAEYWNSQKDILEEDRASVDTVCRHNYQLELRTTLQRRVEPTVTISPSRTEALNHHNLLVCSVTDFYPAQIKVRWFRNDQEETTGVVSTPLIRNGDWTFQILVMLEMTPQRGDVYTCHVEHPSLQNPIIVEWRAQSESAQSK

SEQ ID NO: 251 - protein, 199 aa, Artificial Sequence
  Description of Artificial Sequence: Synthetic polypeptide
  HLA-DQB1*05:03 soluble
GRDSPEDFVYQFKGLCYFTNGTERVRGVTRHIYNREEYVRFDSDVGVYRAVTPQGRPDAEYWNSQKEVLEGARASVDRVCRHNYEVAYRGILQRRVEPTVTISPSRTEALNHHNLLICSVTDFYPSQIKVRWFRNDQEETAGVVSTPLIRNGDWTFQILVMLEMTPQRGDVYTCHVEHPSLQSPITVEWRAQSESAQSK

SEQ ID NO: 252 - protein, 199 aa, Artificial Sequence
  Description of Artificial Sequence: Synthetic polypeptide
  HLA-DQB1*06:03 soluble
GRDSPEDFVYQFKGMCYFTNGTERVRLVTRHIYNREEYARFDSDVGVYRAVTPQGRPDAEYWNSQKEVLEGTRAELDTVCRHNYEVAFRGILQRRVEPTVTISPSRTEALNHHNLLVCSVTDFYPGQIKVRWFRNDQEETAGVVSTPLIRNGDWTFQILVMLEMTPQRGDVYTCHVEHPSLQSPITVEWRAQSESAQSK

SEQ ID NO: 253 - protein, 199 aa, Artificial Sequence
  Description of Artificial Sequence: Synthetic polypeptide
  HLA-DQB1*06:04 soluble
GRDSPEDFVYQFKGMCYFTNGTERVRLVTRHIYNREEYARFDSDVGVYRAVTPQGRPVAEYWNSQKEVLERTRAELDTVCRHNYEVGYRGILQRRVEPTVTISPSRTEALNHHNLLVCSVTDFYPGQIKVQWFRNDQEETAGVVSTPLIRNGDWTFQILVMLEMTPQRGDVYTCHVEHPSLQSPITVEWRAQSESAQSK

SEQ ID NO: 254 - protein, 34 aa, Artificial Sequence
  Description of Artificial Sequence: Synthetic polypeptide
  avitag-Myc-His biotin-mediated
GLNDIFEAQKIEWHEGSGEQKLISEEDLHHHHHH

SEQ ID NO: 255 - protein, 28 aa, Artificial Sequence
  Description of Artificial Sequence: Synthetic peptide
  avitag-Myc biotin-mediated
GLNDIFEAQKIEWHEGSGEQKLISEEDL

SEQ ID NO: 256 - protein, 26 aa, Artificial Sequence
  Description of Artificial Sequence: Synthetic peptide
  sortag-His click conjugation
GSGSAGGSGSGGGSLPETGGHHHHHH

SEQ ID NO: 257 - protein, 20 aa, Artificial Sequence
  Description of Artificial Sequence: Synthetic peptide
  sortag click conjugation
GSGSAGGSGSGGGSLPETGG

SEQ ID NO: 258 - protein, 14 aa, Artificial Sequence
  Description of Artificial Sequence: Synthetic peptide
  V5
GKPIPNPLLGLDST

SEQ ID NO: 259 - protein, 39 aa, Artificial Sequence
  Description of Artificial Sequence: Synthetic polypeptide
  Fos
LTDTLQAETDQLEDEKSALQTEIANLLKEKEKLEFILAA

SEQ ID NO: 260 - protein, 40 aa, Artificial Sequence
  Description of Artificial Sequence: Synthetic polypeptide
  Jun
RIARLEEKVKTLKAQNSELASTANMLREQVAQLKQKVMNH

SEQ ID NO: 261 - protein, 35 aa, Artificial Sequence
  Description of Artificial Sequence: Synthetic polypeptide
  acidic leucine zipper
TTAPSAQLEKELQALQKENAQLEWELQALEKELAQ

SEQ ID NO: 262 - protein, 35 aa, Artificial Sequence
  Description of Artificial Sequence: Synthetic polypeptide
  basic leucine zipper
TTAPSAQLKKKLQALKKKNAQLKWKLQALKKKLAQ

SEQ ID NO: 263 - protein, 232 aa, Artificial Sequence
  Description of Artificial Sequence: Synthetic polypeptide
  knob knob-in-hole
EPKSADKTHTCPPCPAPEAAGGPSVFLFPPKPKDTLMISRTPEVTCVVVDVSHEDPEVKFNWYVDGVEVHNAKTKPREEQYNSTYRVVSVLTVLHQDWLNGKEYKCKVSNKALGAPIEKTISKAKGQPREPQVYTLPPCRDELTKNQVSLWCLVKGFYPSDIAVEWESNGQPENNYKTTPPVLDSDGSFFLYSKLTVDKSRWQQGNVFSCSVMHEALHNHYTQKSLSLSPGK

SEQ ID NO: 264 - protein, 232 aa, Artificial Sequence
  Description of Artificial Sequence: Synthetic polypeptide
  hole knob-in-hole
EPKSADKTHTCPPCPAPEAAGGPSVFLFPPKPKDTLMISRTPEVTCVVVDVSHEDPEVKFNWYVDGVEVHNAKTKPREEQYNSTYRVVSVLTVLHQDWLNGKEYKCKVSNKALGAPIEKTISKAKGQPREPQVCTLPPSRDELTKNQVSLSCAVKGFYPSDIAVEWESNGQPENNYKTTPPVLDSDGSFFLVSKLTVDKSRWQQGNVFSCSVMHEALHNHYTQKSLSLSPGK

SEQ ID NO: 265 - protein, 16 aa, Artificial Sequence
  Description of Artificial Sequence: Synthetic peptide
  spytag
RGVPHIVMVDAYKRYK

SEQ ID NO: 266 - protein, 113 aa, Artificial Sequence
  Description of Artificial Sequence: Synthetic polypeptide
  spycatcher
VTTLSGLSGEQGPSGDMTTEEDSATHIKFSKRDEDGRELAGATMELRDSSGKTISTWISDGHVKDFYLYPGKYTFVETAAPDGYEVATPIEFTVNEDGQVTVDGEATEGDAHT

SEQ ID NO: 267 - protein, 8 aa, Artificial Sequence
  Description of Artificial Sequence: Synthetic peptide
  flag
DYKDDDDK

SEQ ID NO: 268 - protein, 8 aa, Artificial Sequence
  Description of Artificial Sequence: Synthetic peptide
  strep-tag
WSHPQFEK

SEQ ID NO: 269 - protein, 12 aa, Artificial Sequence
  Description of Artificial Sequence: Synthetic peptide
  protein C tag
EDQVDPRLIDGK

SEQ ID NO: 270 - protein, 6 aa, Artificial Sequence
  Description of Artificial Sequence: Synthetic peptide
  upper hinge sequence of human IgG1
VEPKSC

SEQ ID NO: 271 - protein, 18 aa, Artificial Sequence
  Description of Artificial Sequence: Synthetic peptide
  SARS-CoV-2 Spike Protein epitope
KVFRSSVLHSTQDLFLPF

SEQ ID NO: 272 - protein, 18 aa, Artificial Sequence
  Description of Artificial Sequence: Synthetic peptide
  SARS-CoV-2 Spike Protein epitope
HSTQDLFLPFFSNVTWFH

SEQ ID NO: 273 - protein, 17 aa, Artificial Sequence
  Description of Artificial Sequence: Synthetic peptide
  SARS-CoV-2 Spike Protein epitope
ANNCTFEYVSQPFLMDL

SEQ ID NO: 274 - protein, 18 aa, Artificial Sequence
  Description of Artificial Sequence: Synthetic peptide
  SARS-CoV-2 Spike Protein epitope
KSFTVEKGIYQTSNFRVQ

SEQ ID NO: 275 - protein, 17 aa, Artificial Sequence
  Description of Artificial Sequence: Synthetic peptide
  SARS-CoV-2 Spike Protein epitope
SASFSTFKCYGVSPTKL

SEQ ID NO: 276 - protein, 18 aa, Artificial Sequence
  Description of Artificial Sequence: Synthetic peptide
  SARS-CoV-2 Spike Protein epitope
QSIIAYTMSLGAENSVAY

SEQ ID NO: 277 - protein, 18 aa, Artificial Sequence
  Description of Artificial Sequence: Synthetic peptide
  SARS-CoV-2 Spike Protein epitope
AQKFNGLTVLPPLLTDEM

SEQ ID NO: 278 - protein, 16 aa, Artificial Sequence
  Description of Artificial Sequence: Synthetic peptide
  SARS-CoV-2 Spike Protein epitope
GAALQIPFAMQMAYRF

SEQ ID NO: 279 - protein, 15 aa, Artificial Sequence
  Description of Artificial Sequence: Synthetic peptide
  SARS-CoV-2 Nucleocapsid Protein epitope
SWFTALTQHGKEDLK

SEQ ID NO: 280 - protein, 15 aa, Artificial Sequence
  Description of Artificial Sequence: Synthetic peptide
  SARS-CoV-2 Nucleocapsid Protein epitope
DDQIGYYRRATRRIR

SEQ ID NO: 281 - protein, 20 aa, Artificial Sequence
  Description of Artificial Sequence: Synthetic peptide
  SARS-CoV-2 Nucleocapsid Protein epitope
MKDLSPRWYFYYLGTGPEAG

SEQ ID NO: 282 - protein, 15 aa, Artificial Sequence
  Description of Artificial Sequence: Synthetic peptide
  SARS-CoV-2 Nucleocapsid Protein epitope
KAYNVTQAFGRRGPE

SEQ ID NO: 283 - protein, 15 aa, Artificial Sequence
  Description of Artificial Sequence: Synthetic peptide
  SARS-CoV-2 Nucleocapsid Protein epitope
LIRQGTDYKHWPQIA

SEQ ID NO: 284 - protein, 15 aa, Artificial Sequence
  Description of Artificial Sequence: Synthetic peptide
  SARS-CoV-2 Nucleocapsid Protein epitope
WPQIAQFAPSASAFF

SEQ ID NO: 285 - protein, 20 aa, Artificial Sequence
  Description of Artificial Sequence: Synthetic peptide
  SARS-CoV-2 Nucleocapsid Protein epitope
GMEVTPSGTWLTYTGAIKLD

SEQ ID NO: 286 - protein, 9 aa, Artificial Sequence
  Description of Artificial Sequence: Synthetic peptide
  SARS-CoV-2 3A epitope
LLYDANYFL

SEQ ID NO: 287 - protein, 9 aa, Artificial Sequence
  Description of Artificial Sequence: Synthetic peptide
  SARS-CoV-2 ORF1AB epitope
KLWAQCVQL

SEQ ID NO: 288 - protein, 9 aa, Artificial Sequence
  Description of Artificial Sequence: Synthetic peptide
  SARS-CoV-2 Spike Protein epitope
YLQPRTFLL

SEQ ID NO: 289 - protein, 9 aa, Artificial Sequence
  Description of Artificial Sequence: Synthetic peptide
  SARS-CoV-2 ORF1AB epitope
FLLNKEMYL

SEQ ID NO: 290 - protein, 9 aa, Artificial Sequence
  Description of Artificial Sequence: Synthetic peptide
  SARS-CoV-2 ORF1AB epitope
CLLNRYFRL

SEQ ID NO: 291 - protein, 9 aa, Artificial Sequence
  Description of Artificial Sequence: Synthetic peptide
  SARS-CoV-2 ORF1AB epitope
YLATALLTL

SEQ ID NO: 292 - protein, 9 aa, Artificial Sequence
  Description of Artificial Sequence: Synthetic peptide
  SARS-CoV-2 ORF1AB epitope
IVAGGIVAI

SEQ ID NO: 293 - protein, 9 aa, Artificial Sequence
  Description of Artificial Sequence: Synthetic peptide
  SARS-CoV-2 M Protein epitope
GLMWLSYFV

SEQ ID NO: 294 - protein, 9 aa, Artificial Sequence
  Description of Artificial Sequence: Synthetic peptide
  SARS-CoV-2 M Protein epitope
GLMWLSYFI

SEQ ID NO: 295 - protein, 9 aa, Artificial Sequence
  Description of Artificial Sequence: Synthetic peptide
  SARS-CoV-2 N Protein epitope
IKLDDKDPQ

SEQ ID NO: 296 - protein, 9 aa, Artificial Sequence
  Description of Artificial Sequence: Synthetic peptide
  SARS-CoV-2 Spike Protein epitope
RLQSLQTYV

SEQ ID NO: 297 - protein, 9 aa, Artificial Sequence
  Description of Artificial Sequence: Synthetic peptide
  SARS-CoV-2 ORF1AB epitope
ALWEIQQVV

SEQ ID NO: 298 - protein, 9 aa, Artificial Sequence
  Description of Artificial Sequence: Synthetic peptide
  SARS-CoV-2 ORF1AB epitope
FLAHIQWMV

SEQ ID NO: 299 - protein, 9 aa, Artificial Sequence
  Description of Artificial Sequence: Synthetic peptide
  SARS-CoV-2 epitope
YFLQSINFV

SEQ ID NO: 300 - protein, 9 aa, Artificial Sequence
  Description of Artificial Sequence: Synthetic peptide
  SARS-CoV-2 ORF1AB epitope
FLYENAFLP

SEQ ID NO: 301 - protein, 9 aa, Artificial Sequence
  Description of Artificial Sequence: Synthetic peptide
  SARS-CoV-2 ORF1AB epitope
VMAYITGGV

SEQ ID NO: 302 - protein, 9 aa, Artificial Sequence
  Description of Artificial Sequence: Synthetic peptide
  SARS-CoV-2 ORF1AB epitope
VLGSLAATV

SEQ ID NO: 303 - protein, 9 aa, Artificial Sequence
  Description of Artificial Sequence: Synthetic peptide
  SARS-CoV-2 epitope
LIDFYLCFL

SEQ ID NO: 304 - protein, 9 aa, Artificial Sequence
  Description of Artificial Sequence: Synthetic peptide
  SARS-CoV-2 ORF1AB epitope
LLADKFPVL

SEQ ID NO: 305 - protein, 9 aa, Artificial Sequence
  Description of Artificial Sequence: Synthetic peptide
  SARS-CoV-2 ORF1AB epitope
FVDGVPFVV

SEQ ID NO: 306 - protein, 20 aa, Artificial Sequence
  Description of Artificial Sequence: Synthetic peptide
  SARS-CoV-2 M Protein epitope
RGHLRIAGHHLGRCDIKDLP

SEQ ID NO: 307 - protein, 23 aa, Artificial Sequence
  Description of Artificial Sequence: Synthetic peptide
  SARS-CoV-2 M Protein epitope
RGHLRIAGHHLGRCDIKDLPKEI

SEQ ID NO: 308 - protein, 23 aa, Artificial Sequence
  Description of Artificial Sequence: Synthetic peptide
  SARS-CoV-2 M Protein epitope
LRGHLRIAGHHLGRCDIKDLPKE

SEQ ID NO: 309 - protein, 23 aa, Artificial Sequence
  Description of Artificial Sequence: Synthetic peptide
  SARS-CoV-2 M Protein epitope
ILRGHLRIAGHHLGRCDIKDLPK

SEQ ID NO: 310 - protein, 23 aa, Artificial Sequence
  Description of Artificial Sequence: Synthetic peptide
  SARS-CoV-2 M Protein epitope
VILRGHLRIAGHHLGRCDIKDLP

SEQ ID NO: 311 - protein, 9 aa, Artificial Sequence
  Description of Artificial Sequence: Synthetic peptide
  SARS-CoV-2 M Protein epitope
HLRIAGHHL

SEQ ID NO: 312 - protein, 18 aa, Artificial Sequence
  Description of Artificial Sequence: Synthetic peptide
  SARS-CoV-2 M Protein epitope
GAVILRGHLRIAGHHLGR

SEQ ID NO: 313 - protein, 9 aa, Artificial Sequence
  Description of Artificial Sequence: Synthetic peptide
  SARS-CoV-2 E Protein epitope
SVLLFLAFV

SEQ ID NO: 314 - protein, 9 aa, Artificial Sequence
  Description of Artificial Sequence: Synthetic peptide
  SARS-CoV-2 ORF1AB epitope
MLDMYSVML

SEQ ID NO: 315 - protein, 9 aa, Artificial Sequence
  Description of Artificial Sequence: Synthetic peptide
  SARS-CoV-2 ORF1AB epitope
KLNEEIAII

SEQ ID NO: 316 - protein, 9 aa, Artificial Sequence
  Description of Artificial Sequence: Synthetic peptide
  SARS-CoV-2 ORF1AB epitope
NYMPYFFTL

SEQ ID NO: 317 - protein, 9 aa, Artificial Sequence
  Description of Artificial Sequence: Synthetic peptide
  SARS-CoV-2 ORF1AB epitope
VYIGDPAQL

SEQ ID NO: 318 - protein, 9 aa, Artificial Sequence
  Description of Artificial Sequence: Synthetic peptide
  SARS-CoV-2 Spike Protein epitope
QYIKWPWYI

SEQ ID NO: 319 - protein, 9 aa, Artificial Sequence
  Description of Artificial Sequence: Synthetic peptide
  SARS-CoV-2 ORF1AB epitope
YYTSNPTTF

SEQ ID NO: 320 - protein, 9 aa, Artificial Sequence
  Description of Artificial Sequence: Synthetic peptide
  SARS-CoV-2 Spike Protein epitope
NYNYLYRLF

SEQ ID NO: 321 - protein, 9 aa, Artificial Sequence
  Description of Artificial Sequence: Synthetic peptide
  SARS-CoV-2 3A Protein epitope
YYQLYSTQL

SEQ ID NO: 322 - protein, 9 aa, Artificial Sequence
  Description of Artificial Sequence: Synthetic peptide
  SARS-CoV-2 Spike Protein epitope
VYAWNRKRI

SEQ ID NO: 323 - protein, 9 aa, Artificial Sequence
  Description of Artificial Sequence: Synthetic peptide
  SARS-CoV-2 N Protein epitope
SPRWYFYYL

SEQ ID NO: 324 - protein, 9 aa, Artificial Sequence
  Description of Artificial Sequence: Synthetic peptide
  SARS-CoV-2 N Protein epitope
RIRGGDGKM

SEQ ID NO: 325 - protein, 9 aa, Artificial Sequence
  Description of Artificial Sequence: Synthetic peptide
  SARS-CoV-2 N Protein epitope
KPRQKRTAT

SEQ ID NO: 326 - protein, 9 aa, Artificial Sequence
  Description of Artificial Sequence: Synthetic peptide
  SARS-CoV-2 N Protein epitope
QPGQTFSVL

SEQ ID NO: 327 - protein, 9 aa, Artificial Sequence
  Description of Artificial Sequence: Synthetic peptide
  SARS-CoV-2 epitope
PTDNYITTY

SEQ ID NO: 328 - protein, 9 aa, Artificial Sequence
  Description of Artificial Sequence: Synthetic peptide
  SARS-CoV-2 epitope
FTSDYYQLY

SEQ ID NO: 329 - protein, 9 aa, Artificial Sequence
  Description of Artificial Sequence: Synthetic peptide
  SARS-CoV-2 epitope
YADVFHLYL

SEQ ID NO: 330 - protein, 9 aa, Artificial Sequence
  Description of Artificial Sequence: Synthetic peptide
  SARS-CoV-2 epitope
SIIAYTMSL

SEQ ID NO: 331 - protein, 9 aa, Artificial Sequence
  Description of Artificial Sequence: Synthetic peptide
  SARS-CoV-2 epitope
TSQWLTNIF

SEQ ID NO: 332 - protein, 9 aa, Artificial Sequence
  Description of Artificial Sequence: Synthetic peptide
  SARS-CoV-2 epitope
GTDLEGNFY

SEQ ID NO: 333 - protein, 9 aa, Artificial Sequence
  Description of Artificial Sequence: Synthetic peptide
  SARS-CoV-2 epitope
LPSYAALAT

SEQ ID NO: 334 - protein, 9 aa, Artificial Sequence
  Description of Artificial Sequence: Synthetic peptide
  SARS-CoV-2 epitope
CLAYYFMRF

SEQ ID NO: 335 - protein, 9 aa, Artificial Sequence
  Description of Artificial Sequence: Synthetic peptide
  SARS-CoV-2 epitope
NSSTCMMCY

SEQ ID NO: 336 - protein, 9 aa, Artificial Sequence
  Description of Artificial Sequence: Synthetic peptide
  SARS-CoV-2 epitope
ALSKGVHFV

SEQ ID NO: 337 - protein, 9 aa, Artificial Sequence
  Description of Artificial Sequence: Synthetic peptide
  SARS-CoV-2 epitope
LWLLWPVTL

SEQ ID NO: 338 - protein, 9 aa, Artificial Sequence
  Description of Artificial Sequence: Synthetic peptide
  SARS-CoV-2 epitope
KSVNITFEL

SEQ ID NO: 339 - protein, 9 aa, Artificial Sequence
  Description of Artificial Sequence: Synthetic peptide
  SARS-CoV-2 epitope
FLCWHTNCY

SEQ ID NO: 340 - protein, 9 aa, Artificial Sequence
  Description of Artificial Sequence: Synthetic peptide
  SARS-CoV-2 epitope
LLLDRLNQL

SEQ ID NO: 341 - protein, 9 aa, Artificial Sequence
  Description of Artificial Sequence: Synthetic peptide
  SARS-CoV-2 epitope
FLTENLLLY

SEQ ID NO: 342 - protein, 9 aa, Artificial Sequence
  Description of Artificial Sequence: Synthetic peptide
  SARS-CoV-2 epitope
LMNVLTLVY

SEQ ID NO: 343 - protein, 9 aa, Artificial Sequence
  Description of Artificial Sequence: Synthetic peptide
  SARS-CoV-2 epitope
CLAVHECFV

SEQ ID NO: 344 - protein, 9 aa, Artificial Sequence
  Description of Artificial Sequence: Synthetic peptide
  SARS-CoV-2 epitope
STQWSLFFF

SEQ ID NO: 345 - protein, 9 aa, Artificial Sequence
  Description of Artificial Sequence: Synthetic peptide
  SARS-CoV-2 epitope
LSFKELLVY

SEQ ID NO: 346 - protein, 9 aa, Artificial Sequence
  Description of Artificial Sequence: Synthetic peptide
  SARS-CoV-2 epitope
LTALRLCAY

SEQ ID NO: 347 - protein, 9 aa, Artificial Sequence
  Description of Artificial Sequence: Synthetic peptide
  SARS-CoV-2 epitope
KVYPIILRL

SEQ ID NO: 348 - protein, 9 aa, Artificial Sequence
  Description of Artificial Sequence: Synthetic peptide
  SARS-CoV-2 epitope
TYHWLLLTI

SEQ ID NO: 349 - protein, 9 aa, Artificial Sequence
  Description of Artificial Sequence: Synthetic peptide
  SARS-CoV-2 epitope
VMVELVAEL

SEQ ID NO: 350 - protein, 9 aa, Artificial Sequence
  Description of Artificial Sequence: Synthetic peptide
  SARS-CoV-2 epitope
LTDEMIAQY

SEQ ID NO: 351 - protein, 9 aa, Artificial Sequence
  Description of Artificial Sequence: Synthetic peptide
  SARS-CoV-2 epitope
VMHANYIFW

SEQ ID NO: 352 - protein, 9 aa, Artificial Sequence
  Description of Artificial Sequence: Synthetic peptide
  SARS-CoV-2 epitope
YLYALVYFL

SEQ ID NO: 353 - protein, 9 aa, Artificial Sequence
  Description of Artificial Sequence: Synthetic peptide
  SARS-CoV-2 epitope
STDVTIATY

SEQ ID NO: 354 - protein, 9 aa, Artificial Sequence
  Description of Artificial Sequence: Synthetic peptide
  SARS-CoV-2 epitope
TSAMQTMLF

SEQ ID NO: 355 - protein, 9 aa, Artificial Sequence
  Description of Artificial Sequence: Synthetic peptide
  SARS-CoV-2 epitope
FYWFFSNYL

SEQ ID NO: 356 - protein, 9 aa, Artificial Sequence
  Description of Artificial Sequence: Synthetic peptide
  SARS-CoV-2 epitope
KLKDCVMYA

SEQ ID NO: 357 - protein, 9 aa, Artificial Sequence
  Description of Artificial Sequence: Synthetic peptide
  SARS-CoV-2 epitope
KWPWYIWLG

SEQ ID NO: 358 - protein, 9 aa, Artificial Sequence
  Description of Artificial Sequence: Synthetic peptide
  SARS-CoV-2 epitope
TVAYFNMVY

SEQ ID NO: 359 - protein, 9 aa, Artificial Sequence
  Description of Artificial Sequence: Synthetic peptide
  SARS-CoV-2 epitope
RQLLFVVEV

SEQ ID NO: 360 - protein, 9 aa, Artificial Sequence
  Description of Artificial Sequence: Synthetic peptide
  SARS-CoV-2 epitope
LFTRFFYVL

SEQ ID NO: 361 - protein, 9 aa, Artificial Sequence
  Description of Artificial Sequence: Synthetic peptide
  SARS-CoV-2 epitope
VFLVLLPLV

SEQ ID NO: 362 - protein, 9 aa, Artificial Sequence
  Description of Artificial Sequence: Synthetic peptide
  SARS-CoV-2 epitope
VFLVLWPLV

SEQ ID NO: 363 - protein, 9 aa, Artificial Sequence
  Description of Artificial Sequence: Synthetic peptide
  SARS-CoV-2 epitope
LACFVLAAV

SEQ ID NO: 364 - protein, 9 aa, Artificial Sequence
  Description of Artificial Sequence: Synthetic peptide
  SARS-CoV-2 epitope
LLLEWLAMA

SEQ ID NO: 365 - protein, 9 aa, Artificial Sequence
  Description of Artificial Sequence: Synthetic peptide
  SARS-CoV-2 epitope
NVFAFPFTI

SEQ ID NO: 366 - protein, 9 aa, Artificial Sequence
  Description of Artificial Sequence: Synthetic peptide
  SARS-CoV-2 epitope
TLMNVITLV

SEQ ID NO: 367 - protein, 9 aa, Artificial Sequence
  Description of Artificial Sequence: Synthetic peptide
  SARS-CoV-2 epitope
YMPYFFTLL

SEQ ID NO: 368 - protein, 9 aa, Artificial Sequence
  Description of Artificial Sequence: Synthetic peptide
  SARS-CoV-2 epitope
FLPGVYSVI

SEQ ID NO: 369 - protein, 9 aa, Artificial Sequence
  Description of Artificial Sequence: Synthetic peptide
  SARS-CoV-2 epitope
FTVLCLTPV

SEQ ID NO: 370 - protein, 9 aa, Artificial Sequence
  Description of Artificial Sequence: Synthetic peptide
  SARS-CoV-2 epitope
IMLCCMTSC

SEQ ID NO: 371 - protein, 9 aa, Artificial Sequence
  Description of Artificial Sequence: Synthetic peptide
  SARS-CoV-2 epitope
SMMILSDDA

SEQ ID NO: 372 - protein, 9 aa, Artificial Sequence
  Description of Artificial Sequence: Synthetic peptide
  SARS-CoV-2 epitope
TLMNVLTLV

SEQ ID NO: 373 - protein, 9 aa, Artificial Sequence
  Description of Artificial Sequence: Synthetic peptide
  SARS-CoV-2 epitope
YVDNSSLTI

SEQ ID NO: 374 - protein, 9 aa, Artificial Sequence
  Description of Artificial Sequence: Synthetic peptide
  SARS-CoV-2 epitope
YVWKSYVHV

SEQ ID NO: 375 - protein, 9 aa, Artificial Sequence
  Description of Artificial Sequence: Synthetic peptide
  SARS-CoV-2 epitope
KLQFTSLEI

SEQ ID NO: 376 - protein, 9 aa, Artificial Sequence
  Description of Artificial Sequence: Synthetic peptide
  SARS-CoV-2 epitope
KLSYGIATV

SEQ ID NO: 377 - protein, 9 aa, Artificial Sequence
  Description of Artificial Sequence: Synthetic peptide
  SARS-CoV-2 epitope
NLIDSYFVV

SEQ ID NO: 378 - protein, 9 aa, Artificial Sequence
  Description of Artificial Sequence: Synthetic peptide
  SARS-CoV-2 epitope
SMWALVISV

SEQ ID NO: 379 - protein, 9 aa, Artificial Sequence
  Description of Artificial Sequence: Synthetic peptide
  SARS-CoV-2 epitope
SVLYYQNNV

SEQ ID NO: 380 - protein, 9 aa, Artificial Sequence
  Description of Artificial Sequence: Synthetic peptide
  SARS-CoV-2 epitope
WLLWPVTLA

SEQ ID NO: 381 - protein, 9 aa, Artificial Sequence
  Description of Artificial Sequence: Synthetic peptide
  SARS-CoV-2 epitope
YLGGMSYYC

SEQ ID NO: 382 - protein, 9 aa, Artificial Sequence
  Description of Artificial Sequence: Synthetic peptide
  SARS-CoV-2 epitope
YTMADLVYA

SEQ ID NO: 383 - protein, 9 aa, Artificial Sequence
  Description of Artificial Sequence: Synthetic peptide
  SARS-CoV-2 epitope
AIFYLITPV

SEQ ID NO: 384 - protein, 9 aa, Artificial Sequence
  Description of Artificial Sequence: Synthetic peptide
  SARS-CoV-2 epitope
ELYSPIFLI

SEQ ID NO: 385 - protein, 9 aa, Artificial Sequence
  Description of Artificial Sequence: Synthetic peptide
  SARS-CoV-2 epitope
FAFACPDGV

SEQ ID NO: 386 - protein, 9 aa, Artificial Sequence
  Description of Artificial Sequence: Synthetic peptide
  SARS-CoV-2 epitope
FKDNVILLN

SEQ ID NO: 387 - protein, 9 aa, Artificial Sequence
  Description of Artificial Sequence: Synthetic peptide
  SARS-CoV-2 epitope
FLNGSCGSV

SEQ ID NO: 388 - protein, 9 aa, Artificial Sequence
  Description of Artificial Sequence: Synthetic peptide
  SARS-CoV-2 epitope
FLNRFTTTL

SEQ ID NO: 389 - protein, 9 aa, Artificial Sequence
  Description of Artificial Sequence: Synthetic peptide
  SARS-CoV-2 epitope
FSASTSAFV

SEQ ID NO: 390 - protein, 9 aa, Artificial Sequence
  Description of Artificial Sequence: Synthetic peptide
  SARS-CoV-2 epitope
FVCDNIKFA

SEQ ID NO: 391 - protein, 9 aa, Artificial Sequence
  Description of Artificial Sequence: Synthetic peptide
  SARS-CoV-2 epitope
HLLLVAAGL

SEQ ID NO: 392 - protein, 9 aa, Artificial Sequence
  Description of Artificial Sequence: Synthetic peptide
  SARS-CoV-2 epitope
HLMSFPQSA

SEQ ID NO: 393 - protein, 9 aa, Artificial Sequence
  Description of Artificial Sequence: Synthetic peptide
  SARS-CoV-2 epitope
ILFTRFFYV

SEQ ID NO: 394 - protein, 9 aa, Artificial Sequence
  Description of Artificial Sequence: Synthetic peptide
  SARS-CoV-2 epitope
KITEHSWNA

SEQ ID NO: 395 - protein, 9 aa, Artificial Sequence
  Description of Artificial Sequence: Synthetic peptide
  SARS-CoV-2 epitope
KLNIKLLGV

SEQ ID NO: 396 - protein, 10 aa, Artificial Sequence
  Description of Artificial Sequence: Synthetic peptide
  SARS-CoV-2 epitope
KLPDDFTGCV

SEQ ID NO: 397 - protein, 9 aa, Artificial Sequence
  Description of Artificial Sequence: Synthetic peptide
  SARS-CoV-2 epitope
LLDDFVEII

SEQ ID NO: 398 - protein, 9 aa, Artificial Sequence
  Description of Artificial Sequence: Synthetic peptide
  SARS-CoV-2 epitope
LLFLVLIML

SEQ ID NO: 399 - protein, 9 aa, Artificial Sequence
  Description of Artificial Sequence: Synthetic peptide
  SARS-CoV-2 epitope
LLNKHIDAY

SEQ ID NO: 400 - protein, 9 aa, Artificial Sequence
  Description of Artificial Sequence: Synthetic peptide
  SARS-CoV-2 epitope
LMCQPILLL

SEQ ID NO: 401 - protein, 9 aa, Artificial Sequence
  Description of Artificial Sequence: Synthetic peptide
  SARS-CoV-2 epitope
LPDDFMGCV

SEQ ID NO: 402 - protein, 9 aa, Artificial Sequence
  Description of Artificial Sequence: Synthetic peptide
  SARS-CoV-2 epitope
LVLSVNPYV

SEQ ID NO: 403 - protein, 9 aa, Artificial Sequence
  Description of Artificial Sequence: Synthetic peptide
  SARS-CoV-2 epitope
RIMTWLDMV

SEQ ID NO: 404 - protein, 9 aa, Artificial Sequence
  Description of Artificial Sequence: Synthetic peptide
  SARS-CoV-2 epitope
RLANECAQV

SEQ ID NO: 405 - protein, 9 aa, Artificial Sequence
  Description of Artificial Sequence: Synthetic peptide
  SARS-CoV-2 epitope
RTIKVFTTV

SEQ ID NO: 406 - protein, 9 aa, Artificial Sequence
  Description of Artificial Sequence: Synthetic peptide
  SARS-CoV-2 epitope
TILTSLLVL

SEQ ID NO: 407 - protein, 9 aa, Artificial Sequence
  Description of Artificial Sequence: Synthetic peptide
  SARS-CoV-2 epitope
TLKNTVCTV

SEQ ID NO: 408 - protein, 9 aa, Artificial Sequence
  Description of Artificial Sequence: Synthetic peptide
  SARS-CoV-2 epitope
TQWSLFFFL

SEQ ID NO: 409 - protein, 9 aa, Artificial Sequence
  Description of Artificial Sequence: Synthetic peptide
  SARS-CoV-2 epitope
VLSTFISAA

SEQ ID NO: 410 - protein, 9 aa, Artificial Sequence
  Description of Artificial Sequence: Synthetic peptide
  SARS-CoV-2 epitope
WLPTGTLLV

SEQ ID NO: 411 - protein, 9 aa, Artificial Sequence
  Description of Artificial Sequence: Synthetic peptide
  SARS-CoV-2 epitope
WMVMFTPLV

SEQ ID NO: 412 - protein, 9 aa, Artificial Sequence
  Description of Artificial Sequence: Synthetic peptide
  SARS-CoV-2 epitope
YLDAYNMMI

SEQ ID NO: 413 - protein, 9 aa, Artificial Sequence
  Description of Artificial Sequence: Synthetic peptide
  SARS-CoV-2 epitope
YLFDESGEF

SEQ ID NO: 414 - protein, 9 aa, Artificial Sequence
  Description of Artificial Sequence: Synthetic peptide
  SARS-CoV-2 epitope
YQDVNCTEV

SEQ ID NO: 415 - protein, 9 aa, Artificial Sequence
  Description of Artificial Sequence: Synthetic peptide
  SARS-CoV-2 epitope
YVDDSSLTI

SEQ ID NO: 416 - protein, 9 aa, Artificial Sequence
  Description of Artificial Sequence: Synthetic peptide
  SARS-CoV-2 epitope
YVVDDPCPI

SEQ ID NO: 417 - protein, 12 aa, Homo sapiens
  TCR CDR3
CAMYEGNEKLTF

SEQ ID NO: 418 - protein, 11 aa, Homo sapiens
  TCR CDR3
CLVGNNARLMF

SEQ ID NO: 419 - protein, 17 aa, Homo sapiens
  TCR CDR3
CAVRSHGSGGSNYKLTF

SEQ ID NO: 420 - protein, 12 aa, Homo sapiens
  TCR CDR3
CAVVTPPARLMF

SEQ ID NO: 421 - protein, 11 aa, Homo sapiens
  TCR CDR3
CVVNEGDKIIF

SEQ ID NO: 422 - protein, 17 aa, Homo sapiens
  TCR CDR3
CAMREASASGGSYIPTF

SEQ ID NO: 423 - protein, 12 aa, Homo sapiens
  TCR CDR3
CAAVNNNARLMF

SEQ ID NO: 424 - protein, 11 aa, Homo sapiens
  TCR CDR3
CVVNSGNKLVF

SEQ ID NO: 425 - protein, 11 aa, Homo sapiens
  TCR CDR3
CAGRTFDKIIF

SEQ ID NO: 426 - protein, 15 aa, Homo sapiens
  TCR CDR3
CVVTPRGSTLGRLYF

SEQ ID NO: 427 - protein, 18 aa, Homo sapiens
  TCR CDR3
CAVQAPMSARGSQGNLIF

SEQ ID NO: 428 - protein, 9 aa, Homo sapiens
  TCR CDR3
CAVKTDMRF

SEQ ID NO: 429 - protein, 12 aa, Homo sapiens
  TCR CDR3
CVVTRSQGNLIF

SEQ ID NO: 430 - protein, 14 aa, Homo sapiens
  TCR CDR3
CVVNAPSGNTPLVF

SEQ ID NO: 431 - protein, 13 aa, Homo sapiens
  TCR CDR3
CAGLGTGRRALTF

SEQ ID NO: 432 - protein, 11 aa, Homo sapiens
  TCR CDR3
CVVNKEDRLMF

SEQ ID NO: 433 - protein, 18 aa, Homo sapiens
  TCR CDR3
CAMREGPAEGGANSKLTF

SEQ ID NO: 434 - protein, 11 aa, Homo sapiens
  TCR CDR3
CAVRQNDKIIF

SEQ ID NO: 435 - protein, 13 aa, Homo sapiens
  TCR CDR3
CVVTGAGSYQLTF

SEQ ID NO: 436 - protein, 12 aa, Homo sapiens
  TCR CDR3
CVVNMATDKLIF

SEQ ID NO: 437 - protein, 13 aa, Homo sapiens
  TCR CDR3
CAGGPSRNNDMRF

SEQ ID NO: 438 - protein, 13 aa, Homo sapiens
  TCR CDR3
CAVIVAGNTPLVF

SEQ ID NO: 439 - protein, 14 aa, Homo sapiens
  TCR CDR3
CVVNPTGTASKLTF

SEQ ID NO: 440 - protein, 13 aa, Homo sapiens
  TCR CDR3
CVVITGGYNKLIF

SEQ ID NO: 441 - protein, 14 aa, Homo sapiens
  TCR CDR3
CAAIGGSTLGRLYF

SEQ ID NO: 442 - protein, 12 aa, Homo sapiens
  TCR CDR3
CAVGDGNNRLAF

SEQ ID NO: 443 - protein, 13 aa, Homo sapiens
  TCR CDR3
CAWILSGNTPLVF

SEQ ID NO: 444 - protein, 13 aa, Homo sapiens
  TCR CDR3
CALGNTGGFKTIF

SEQ ID NO: 445 - protein, 13 aa, Homo sapiens
  TCR CDR3
CALGALTGQNFVF

SEQ ID NO: 446 - protein, 14 aa, Homo sapiens
  TCR CDR3
CAFPSGGSNYKLTF

SEQ ID NO: 447 - protein, 18 aa, Homo sapiens
  TCR CDR3
CGTAFFNAGGTSYGKLTF

SEQ ID NO: 448 - protein, 15 aa, Homo sapiens
  TCR CDR3
CVVNDPNSGNTPLVF

SEQ ID NO: 449 - protein, 11 aa, Homo sapiens
  TCR CDR3
CAYMDNNDMRF

SEQ ID NO: 450 - protein, 10 aa, Homo sapiens
  TCR CDR3
CAYHERALTF

SEQ ID NO: 451 - protein, 11 aa, Homo sapiens
  TCR CDR3
CLAVNTDKLIF

SEQ ID NO: 452 - protein, 13 aa, Homo sapiens
  TCR CDR3
CAMQSDSWGKLQF

SEQ ID NO: 453 - protein, 11 aa, Homo sapiens
  TCR CDR3
CAGAGGQKLLF

SEQ ID NO: 454 - protein, 13 aa, Homo sapiens
  TCR CDR3
CGTESPGNNDMRF

SEQ ID NO: 455 - protein, 16 aa, Homo sapiens
  TCR CDR3
CLVGGWVSGGSYIPTF

SEQ ID NO: 456 - protein, 14 aa, Homo sapiens
  TCR CDR3
CALMEANQGGKLIF

SEQ ID NO: 457 - protein, 12 aa, Homo sapiens
  TCR CDR3
CAASTGGQKLLF

SEQ ID NO: 458 - protein, 11 aa, Homo sapiens
  TCR CDR3
CVVNKDNDMRF

SEQ ID NO: 459 - protein, 14 aa, Homo sapiens
  TCR CDR3
CAGARSGNTGKLIF

SEQ ID NO: 460 - protein, 11 aa, Homo sapiens
  TCR CDR3
CAAGRDDKIIF

SEQ ID NO: 461 - protein, 17 aa, Homo sapiens
  TCR CDR3
CAMRGAINTGTASKLTF

SEQ ID NO: 462 - protein, 15 aa, Homo sapiens
  TCR CDR3
CALSVRIQGAQKLVF

SEQ ID NO: 463 - protein, 11 aa, Homo sapiens
  TCR CDR3
CAVWRFQKLVF

SEQ ID NO: 464 - protein, 12 aa, Homo sapiens
  TCR CDR3
CVVNSGNTPLVF

SEQ ID NO: 465 - protein, 12 aa, Homo sapiens
  TCR CDR3
CAYIETGNQFYF

SEQ ID NO: 466 - protein, 12 aa, Homo sapiens
  TCR CDR3
CAYTENNARLMF

SEQ ID NO: 467 - protein, 15 aa, Homo sapiens
  TCR CDR3
CAESALGGSQGNLIF

SEQ ID NO: 468 - protein, 13 aa, Homo sapiens
  TCR CDR3
CVVRYDSWGKLQF

SEQ ID NO: 469 - protein, 13 aa, Homo sapiens
  TCR CDR3
CVVRADSWGKLQF

SEQ ID NO: 470 - protein, 14 aa, Homo sapiens
  TCR CDR3
CALIGGSNDYKLSF

SEQ ID NO: 471 - protein, 11 aa, Homo sapiens
  TCR CDR3
CATGNNNDMRF

SEQ ID NO: 472 - protein, 12 aa, Homo sapiens
  TCR CDR3
CAILQGAQKLVF

SEQ ID NO: 473 - protein, 16 aa, Homo sapiens
  TCR CDR3
CALSESGSTGDYKLSF

SEQ ID NO: 474 - protein, 10 aa, Homo sapiens
  TCR CDR3
CAGQRDDMRF

SEQ ID NO: 475 - protein, 16 aa, Homo sapiens
  TCR CDR3
CALPTSRNSGNTPLVF

SEQ ID NO: 476 - protein, 12 aa, Homo sapiens
  TCR CDR3
CAYSGTASKLTF

SEQ ID NO: 477 - protein, 13 aa, Homo sapiens
  TCR CDR3
CAMRRPGANNLFF

SEQ ID NO: 478 - protein, 11 aa, Homo sapiens
  TCR CDR3
CAVNRDDKIIF

SEQ ID NO: 479 - protein, 12 aa, Homo sapiens
  TCR CDR3
CAVNQAGTALIF

SEQ ID NO: 480 - protein, 13 aa, Homo sapiens
  TCR CDR3
CAVIYSGNTPLVF

SEQ ID NO: 481 - protein, 14 aa, Homo sapiens
  TCR CDR3
CAALSGGGADGLTF

SEQ ID NO: 482 - protein, 13 aa, Homo sapiens
  TCR CDR3
CAVRDLGGQKLLF

SEQ ID NO: 483 - protein, 13 aa, Homo sapiens
  TCR CDR3
CAVSTGTASKLTF

SEQ ID NO: 484 - protein, 11 aa, Homo sapiens
  TCR CDR3
CSKTSYDKVIF

SEQ ID NO: 485 - protein, 11 aa, Homo sapiens
  TCR CDR3
CVVNRGDGLTF

SEQ ID NO: 486 - protein, 11 aa, Homo sapiens
  TCR CDR3
CLVANNARLMF

SEQ ID NO: 487 - protein, 13 aa, Homo sapiens
  TCR CDR3
CAVYGGSQGNLIF

SEQ ID NO: 488 - protein, 14 aa, Homo sapiens
  TCR CDR3
CAVNEGGGSYIPTF

SEQ ID NO: 489 - protein, 14 aa, Homo sapiens
  TCR CDR3
CAASNRGGSEKLVF

SEQ ID NO: 490 - protein, 13 aa, Homo sapiens
  TCR CDR3
CAGNTGTASKLTF

SEQ ID NO: 491 - protein, 12 aa, Homo sapiens
  TCR CDR3
CAAPTNNNDMRF

SEQ ID NO: 492 - protein, 14 aa, Homo sapiens
  TCR CDR3
CAERTALGYSTLTF

SEQ ID NO: 493 - protein, 9 aa, Homo sapiens
  TCR CDR3
CADDYKLSF

SEQ ID NO: 494 - protein, 14 aa, Homo sapiens
  TCR CDR3
CVVNDPAGSYQLTF

SEQ ID NO: 495 - protein, 12 aa, Homo sapiens
  TCR CDR3
CAERGGGFKTIF

SEQ ID NO: 496 - protein, 16 aa, Homo sapiens
  TCR CDR3
CAVEGNYGGSQGNLIF

SEQ ID NO: 497 - protein, 14 aa, Homo sapiens
  TCR CDR3
CALTGNTGGFKTIF

SEQ ID NO: 498 - protein, 11 aa, Homo sapiens
  TCR CDR3
CAESKEGKLIF

SEQ ID NO: 499 - protein, 14 aa, Homo sapiens
  TCR CDR3
CVVNMGRGYSTLTF

SEQ ID NO: 500 - protein, 15 aa, Homo sapiens
  TCR CDR3
CAMTWGGTSYGKLTF

SEQ ID NO: 501 - protein, 11 aa, Homo sapiens
  TCR CDR3
CVVNQYNDMRF

SEQ ID NO: 502 - protein, 15 aa, Homo sapiens
  TCR CDR3
CAVIGGSSNTGKLIF

SEQ ID NO: 503 - protein, 12 aa, Homo sapiens
  TCR CDR3
CVVNNAGNMLTF

SEQ ID NO: 504 - protein, 13 aa, Homo sapiens
  TCR CDR3
CALSYSDGQKLLF

SEQ ID NO: 505 - protein, 13 aa, Homo sapiens
  TCR CDR3
CAMSANAGNMLTF

SEQ ID NO: 506 - protein, 11 aa, Homo sapiens
  TCR CDR3
CALDYGQNFVF

SEQ ID NO: 507 - protein, 11 aa, Homo sapiens
  TCR CDR3
CVVNNNNDMRF

SEQ ID NO: 508 - protein, 15 aa, Homo sapiens
  TCR CDR3
CAAPMTTDSWGKLQF

SEQ ID NO: 509 - protein, 16 aa, Homo sapiens
  TCR CDR3
CALSLIIYNQGGKLIF

SEQ ID NO: 510 - protein, 12 aa, Homo sapiens
  TCR CDR3
CVVNYDTDKLIF

SEQ ID NO: 511 - protein, 11 aa, Homo sapiens
  TCR CDR3
CVVNEEDKLIF

SEQ ID NO: 512 - protein, 14 aa, Homo sapiens
  TCR CDR3
CAFTNYNQGGKLIF

SEQ ID NO: 513 - protein, 12 aa, Homo sapiens
  TCR CDR3
CAVHLNDYKLSF

SEQ ID NO: 514 - protein, 13 aa, Homo sapiens
  TCR CDR3
CVVNRDTGNQFYF

SEQ ID NO: 515 - protein, 11 aa, Homo sapiens
  TCR CDR3
CVVNRDNDMRF

SEQ ID NO: 516 - protein, 15 aa, Homo sapiens
  TCR CDR3
CLVGAESGGYNKLIF

SEQ ID NO: 517 - protein, 14 aa, Homo sapiens
  TCR CDR3
CAFPRGGSNYKLTF

SEQ ID NO: 518 - protein, 13 aa, Homo sapiens
  TCR CDR3
CAARYSGNTPLVF

SEQ ID NO: 519 - protein, 11 aa, Homo sapiens
  TCR CDR3
CVVNGNNDMRF

SEQ ID NO: 520 - protein, 16 aa, Homo sapiens
  TCR CDR3
CAMRDSNSNSGYALNF

SEQ ID NO: 521 - protein, 14 aa, Homo sapiens
  TCR CDR3
CAASQISDGQKLLF

SEQ ID NO: 522 - protein, 9 aa, Homo sapiens
  TCR CDR3
CAENARLMF

SEQ ID NO: 523 - protein, 13 aa, Homo sapiens
  TCR CDR3
CAVRGADNARLMF

SEQ ID NO: 524 - protein, 12 aa, Homo sapiens
  TCR CDR3
CALMDSSYKLIF

SEQ ID NO: 525 - protein, 14 aa, Homo sapiens
  TCR CDR3
CAAMNNTNAGKSTF

SEQ ID NO: 526 - protein, 17 aa, Homo sapiens
  TCR CDR3
CAMREGVIYNQGGKLIF

SEQ ID NO: 527 - protein, 11 aa, Homo sapiens
  TCR CDR3
CAVLGGDKIIF

SEQ ID NO: 528 - protein, 12 aa, Homo sapiens
  TCR CDR3
CAEVGSQGNLIF

SEQ ID NO: 529 - protein, 14 aa, Homo sapiens
  TCR CDR3
CAMSQMDSSYKLIF

SEQ ID NO: 530 - protein, 13 aa, Homo sapiens
  TCR CDR3
CAMRGLQGGKLIF

SEQ ID NO: 531 - protein, 10 aa, Homo sapiens
  TCR CDR3
CASGNTPLVF

SEQ ID NO: 532 - protein, 13 aa, Homo sapiens
  TCR CDR3
CVVNGYNTDKLIF

SEQ ID NO: 533 - protein, 14 aa, Homo sapiens
  TCR CDR3
CAMSPNNAGNMLTF

SEQ ID NO: 534 - protein, 16 aa, Homo sapiens
  TCR CDR3
CALNQDRGSTLGRLYF

SEQ ID NO: 535 - protein, 11 aa, Homo sapiens
  TCR CDR3
CAYKENYKYIF

SEQ ID NO: 536 - protein, 12 aa, Homo sapiens
  TCR CDR3
CAMSASPNDMRF

SEQ ID NO: 537 - protein, 14 aa, Homo sapiens
  TCR CDR3
CAVNAPSSASKIIF

SEQ ID NO: 538 - protein, 15 aa, Homo sapiens
  TCR CDR3
CASGGLMRGLDTQYF

SEQ ID NO: 539 - protein, 16 aa, Homo sapiens
  TCR CDR3
CASSLDRESMNTEAFF

SEQ ID NO: 540 - protein, 13 aa, Homo sapiens
  TCR CDR3
CASRELGQETQYF

SEQ ID NO: 541 - protein, 19 aa, Homo sapiens
  TCR CDR3
CASSPLTGQGLGGAYEQYF

SEQ ID NO: 542 - protein, 11 aa, Homo sapiens
  TCR CDR3
CASSADIEQYF

SEQ ID NO: 543 - protein, 13 aa, Homo sapiens
  TCR CDR3
CASSTYRGQPQHF

SEQ ID NO: 544 - protein, 15 aa, Homo sapiens
  TCR CDR3
CASSEGESNTGELFF

SEQ ID NO: 545 - protein, 15 aa, Homo sapiens
  TCR CDR3
CASSADAGTSSEQFF

SEQ ID NO: 546 - protein, 16 aa, Homo sapiens
  TCR CDR3
CASSIVPGSPSRGYTF

SEQ ID NO: 547 - protein, 16 aa, Homo sapiens
  TCR CDR3
CASSTEDRVSYNEQFF

SEQ ID NO: 548 - protein, 15 aa, Homo sapiens
  TCR CDR3
CASSSKGGGQQTQYF

SEQ ID NO: 549 - protein, 15 aa, Homo sapiens
  TCR CDR3
CASSDRDSVNYGYTF

SEQ ID NO: 550 - protein, 14 aa, Homo sapiens
  TCR CDR3
CASRASGGFNEQFF

SEQ ID NO: 551 - protein, 16 aa, Homo sapiens
  TCR CDR3
CSARDRQGQNTGELFF

SEQ ID NO: 552 - protein, 14 aa, Homo sapiens
  TCR CDR3
CAISERDFQETQYF

SEQ ID NO: 553 - protein, 14 aa, Homo sapiens
  TCR CDR3
CASHSDRNTGELFF

SEQ ID NO: 554 - protein, 14 aa, Homo sapiens
  TCR CDR3
CSVDRDRNTGELFF

SEQ ID NO: 555 - protein, 16 aa, Homo sapiens
  TCR CDR3
CASNLLTGGDADTQYF

SEQ ID NO: 556 - protein, 13 aa, Homo sapiens
  TCR CDR3
CASSLAGAQGYTF

SEQ ID NO: 557 - protein, 12 aa, Homo sapiens
  TCR CDR3
CATSDDSEKLFF

SEQ ID NO: 558 - protein, 13 aa, Homo sapiens
  TCR CDR3
CASGGTNTGELFF

SEQ ID NO: 559 - protein, 13 aa, Homo sapiens
  TCR CDR3
CASSPALGREQYF

SEQ ID NO: 560 - protein, 13 aa, Homo sapiens
  TCR CDR3
CASSFGGSTEAFF

SEQ ID NO: 561 - protein, 14 aa, Homo sapiens
  TCR CDR3
CASSVAGGLYEQFF

SEQ ID NO: 562 - protein, 16 aa, Homo sapiens
  TCR CDR3
CASSLIGAGSTDTQYF

SEQ ID NO: 563 - protein, 19 aa, Homo sapiens
  TCR CDR3
CASSPIKDTRQEYTGELFF

SEQ ID NO: 564 - protein, 15 aa, Homo sapiens
  TCR CDR3
CASSLGTASTDTQYF

SEQ ID NO: 565 - protein, 14 aa, Homo sapiens
  TCR CDR3
CASSLGTGGTEAFF

SEQ ID NO: 566 - protein, 16 aa, Homo sapiens
  TCR CDR3
CASSVEVQARSDTQYF

SEQ ID NO: 567 - protein, 15 aa, Homo sapiens
  TCR CDR3
CASSRLESLGNTIYF

SEQ ID NO: 568 - protein, 16 aa, Homo sapiens
  TCR CDR3
CSARDIGTGAHYEQYF

SEQ ID NO: 569 - protein, 14 aa, Homo sapiens
  TCR CDR3
CASSPGASYNEQFF

SEQ ID NO: 570 - protein, 16 aa, Homo sapiens
  TCR CDR3
CSARDQASQNTGELFF

SEQ ID NO: 571 - protein, 14 aa, Homo sapiens
  TCR CDR3
CASSDGQGGYGYTF

SEQ ID NO: 572 - protein, 15 aa, Homo sapiens
  TCR CDR3
CASSHGTTTYNEQFF

SEQ ID NO: 573 - protein, 15 aa, Homo sapiens
  TCR CDR3
CASSRTGGSYNEQFF

SEQ ID NO: 574 - protein, 11 aa, Homo sapiens
  TCR CDR3
CSASPLLEQYF

SEQ ID NO: 575 - protein, 17 aa, Homo sapiens
  TCR CDR3
CASSQDSGTGSKNTIYF

SEQ ID NO: 576 - protein, 15 aa, Homo sapiens
  TCR CDR3
CASSSSALEDPEQYF

SEQ ID NO: 577 - protein, 15 aa, Homo sapiens
  TCR CDR3
CASKTGGAAKNIQYF

SEQ ID NO: 578 - protein, 15 aa, Homo sapiens
  TCR CDR3
CASSVGGSWTDTQYF

SEQ ID NO: 579 - protein, 17 aa, Homo sapiens
  TCR CDR3
CASSDLAQYLNTGELFF

SEQ ID NO: 580 - protein, 13 aa, Homo sapiens
  TCR CDR3
CASQDINTGELFF

SEQ ID NO: 581 - protein, 16 aa, Homo sapiens
  TCR CDR3
CASSLGPGQGYNEQFF

SEQ ID NO: 582 - protein, 16 aa, Homo sapiens
  TCR CDR3
CASSSMTSGIRYEQYF

SEQ ID NO: 583 - protein, 19 aa, Homo sapiens
  TCR CDR3
CAISESWTSGIGREETQYF

SEQ ID NO: 584 - protein, 16 aa, Homo sapiens
  TCR CDR3
CASSLYEDRANWEQYF

SEQ ID NO: 585 - protein, 16 aa, Homo sapiens
  TCR CDR3
CSAQSQLRVLEETQYF

SEQ ID NO: 586 - protein, 15 aa, Homo sapiens
  TCR CDR3
CASSYLYRVAGELFF

SEQ ID NO: 587 - protein, 14 aa, Homo sapiens
  TCR CDR3
CASSTGTVGYEQYF

SEQ ID NO: 588 - protein, 14 aa, Homo sapiens
  TCR CDR3
CASSLQGTGYGYTF

SEQ ID NO: 589 - protein, 16 aa, Homo sapiens
  TCR CDR3
CASRSWVRAPNQPQHF

SEQ ID NO: 590 - protein, 14 aa, Homo sapiens
  TCR CDR3
CASSLASNNYEQYF

SEQ ID NO: 591 - protein, 14 aa, Homo sapiens
  TCR CDR3
CASSFSSNSYEQYF

SEQ ID NO: 592 - protein, 15 aa, Homo sapiens
  TCR CDR3
CAKLVTGAVSGEQFF

SEQ ID NO: 593 - protein, 15 aa, Homo sapiens
  TCR CDR3
CASSSSTGGNYGYTF

SEQ ID NO: 594 - protein, 12 aa, Homo sapiens
  TCR CDR3
CASSLVSGELFF

SEQ ID NO: 595 - protein, 15 aa, Homo sapiens
  TCR CDR3
CATNPAGGPYNEQFF

SEQ ID NO: 596 - protein, 12 aa, Homo sapiens
  TCR CDR3
CATSGDRGWQYF

SEQ ID NO: 597 - protein, 15 aa, Homo sapiens
  TCR CDR3
CASSSIWTSVNEQFF

SEQ ID NO: 598 - protein, 15 aa, Homo sapiens
  TCR CDR3
CSVVDRGRFYNEQFF

SEQ ID NO: 599 - protein, 18 aa, Homo sapiens
  TCR CDR3
CASSAQEGRIEMNTEAFF

SEQ ID NO: 600 - protein, 11 aa, Homo sapiens
  TCR CDR3
CASSPDIEQYF

SEQ ID NO: 601 - protein, 13 aa, Homo sapiens
  TCR CDR3
CASSIGLGGGYTF

SEQ ID NO: 602 - protein, 12 aa, Homo sapiens
  TCR CDR3
CASSLGGAEAFF

SEQ ID NO: 603 - protein, 18 aa, Homo sapiens
  TCR CDR3
CASSEALSGGAPAETQYF

SEQ ID NO: 604 - protein, 18 aa, Homo sapiens
  TCR CDR3
CASSLGQGSPAGANVLTF

SEQ ID NO: 605 - protein, 12 aa, Homo sapiens
  TCR CDR3
CATRGVGETQYF

SEQ ID NO: 606 - protein, 14 aa, Homo sapiens
  TCR CDR3
CASSVVDRNNEQFF

SEQ ID NO: 607 - protein, 16 aa, Homo sapiens
  TCR CDR3
CSARDQQGQNTGELFF

SEQ ID NO: 608 - protein, 16 aa, Homo sapiens
  TCR CDR3
CASSQDRDNLNTEAFF

SEQ ID NO: 609 - protein, 12 aa, Homo sapiens
  TCR CDR3
CASSESNYGYTF

SEQ ID NO: 610 - protein, 19 aa, Homo sapiens
  TCR CDR3
CASSLAMGTSGGPYNEQFF

SEQ ID NO: 611 - protein, 16 aa, Homo sapiens
  TCR CDR3
CASSYHAGDRGFGYTF

SEQ ID NO: 612 - protein, 14 aa, Homo sapiens
  TCR CDR3
CASSLWGGYTEAFF

SEQ ID NO: 613 - protein, 15 aa, Homo sapiens
  TCR CDR3
CASSYVTGASYEQYF

SEQ ID NO: 614 - protein, 13 aa, Homo sapiens
  TCR CDR3
CASSTTGGEEQFF

SEQ ID NO: 615 - protein, 13 aa, Homo sapiens
  TCR CDR3
CASSTTGGEEQFF

SEQ ID NO: 616 - protein, 14 aa, Homo sapiens
  TCR CDR3
CASKKTPVGTEAFF

SEQ ID NO: 617 - protein, 16 aa, Homo sapiens
  TCR CDR3
CASSPPSGGNTGELFF

SEQ ID NO: 618 - protein, 15 aa, Homo sapiens
  TCR CDR3
CASSSRTAPSDTQYF

SEQ ID NO: 619 - protein, 15 aa, Homo sapiens
  TCR CDR3
CASSINPSSYNEQFF

SEQ ID NO: 620 - protein, 15 aa, Homo sapiens
  TCR CDR3
CASSLDSSLGYGYTF

SEQ ID NO: 621 - protein, 14 aa, Homo sapiens
  TCR CDR3
CAYQPPGGGNIQYF

SEQ ID NO: 622 - protein, 16 aa, Homo sapiens
  TCR CDR3
CASSPVAGGNTGELFF

SEQ ID NO: 623 - protein, 15 aa, Homo sapiens
  TCR CDR3
CSAIEEGTEVFGYTF

SEQ ID NO: 624 - protein, 14 aa, Homo sapiens
  TCR CDR3
CASFQDQNTGELFF

SEQ ID NO: 625 - protein, 13 aa, Homo sapiens
  TCR CDR3
CASSLAGAQQAFF

SEQ ID NO: 626 - protein, 13 aa, Homo sapiens
  TCR CDR3
CATQNLNTGELFF

SEQ ID NO: 627 - protein, 15 aa, Homo sapiens
  TCR CDR3
CASSLAGGWGTEAFF

SEQ ID NO: 628 - protein, 18 aa, Homo sapiens
  TCR CDR3
CASRPLTGGPLAKNIQYF

SEQ ID NO: 629 - protein, 12 aa, Homo sapiens
  TCR CDR3
CASSIGSREAFF

SEQ ID NO: 630 - protein, 13 aa, Homo sapiens
  TCR CDR3
CATTDLDSGELFF

SEQ ID NO: 631 - protein, 15 aa, Homo sapiens
  TCR CDR3
CASSSAARTGNEQFF

SEQ ID NO: 632 - protein, 15 aa, Homo sapiens
  TCR CDR3
CASSPTSGSRETQYF

SEQ ID NO: 633 - protein, 13 aa, Homo sapiens
  TCR CDR3
CATGGLNTGELFF

SEQ ID NO: 634 - protein, 13 aa, Homo sapiens
  TCR CDR3
CAGSTSLTGELFF

SEQ ID NO: 635 - protein, 15 aa, Homo sapiens
  TCR CDR3
CASSPAGGAVLQAFF

SEQ ID NO: 636 - protein, 16 aa, Homo sapiens
  TCR CDR3
CASSRPSGQGNNGYTF

SEQ ID NO: 637 - protein, 14 aa, Homo sapiens
  TCR CDR3
CAWLRDMNTGELFF

SEQ ID NO: 638 - protein, 13 aa, Homo sapiens
  TCR CDR3
CASMDLNTGELFF

SEQ ID NO: 639 - protein, 17 aa, Homo sapiens
  TCR CDR3
CASSQGDYRSSTYEQYF

SEQ ID NO: 640 - protein, 16 aa, Homo sapiens
  TCR CDR3
CSARDVVSGGHYEQYF

SEQ ID NO: 641 - protein, 11 aa, Homo sapiens
  TCR CDR3
CASSPDIEQFF

SEQ ID NO: 642 - protein, 14 aa, Homo sapiens
  TCR CDR3
CASSTGSNTGELFF

SEQ ID NO: 643 - protein, 13 aa, Homo sapiens
  TCR CDR3
CARQDSNTGELFF

SEQ ID NO: 644 - protein, 16 aa, Homo sapiens
  TCR CDR3
CASSDGHQGLQETQYF

SEQ ID NO: 645 - protein, 17 aa, Homo sapiens
  TCR CDR3
CASSYQPGVATNEKLFF

SEQ ID NO: 646 - protein, 15 aa, Homo sapiens
  TCR CDR3
CASSETGSSSYEQYF

SEQ ID NO: 647 - protein, 14 aa, Homo sapiens
  TCR CDR3
CASSSVSLGNEQFF

SEQ ID NO: 648 - protein, 16 aa, Homo sapiens
  TCR CDR3
CASSLEMQGALYGYTF

SEQ ID NO: 649 - protein, 16 aa, Homo sapiens
  TCR CDR3
CASSLFSSGQGNGYTF

SEQ ID NO: 650 - protein, 14 aa, Homo sapiens
  TCR CDR3
CAWSRGSAYNEQFF

SEQ ID NO: 651 - protein, 19 aa, Homo sapiens
  TCR CDR3
CASSYYPSASGRADETQYF

SEQ ID NO: 652 - protein, 13 aa, Homo sapiens
  TCR CDR3
CSAPGTGYNEQFF

SEQ ID NO: 653 - protein, 14 aa, Homo sapiens
  TCR CDR3
CAAIGGSTLGRLYF

SEQ ID NO: 654 - skipped

SEQ ID NO: 655 - protein, 13 aa, Homo sapiens
  TCR CDR3
CVARTDSWGKLQF

SEQ ID NO: 656 - protein, 18 aa, Homo sapiens
  TCR CDR3
CAVQAPMSARGSQGNLIF

SEQ ID NO: 657 - protein, 13 aa, Homo sapiens
  TCR CDR3
CAVIYSGNTPLVF

SEQ ID NO: 658 - protein, 11 aa, Homo sapiens
  TCR CDR3
CVVNMNNDMRF

SEQ ID NO: 659 - protein, 11 aa, Homo sapiens
  TCR CDR3
CVVNRDDKIIF

SEQ ID NO: 660 - protein, 11 aa, Homo sapiens
  TCR CDR3
CAVNRDDKIIF

SEQ ID NO: 661 - protein, 14 aa, Homo sapiens
  TCR CDR3
CVVNAPSGNTPLVF

SEQ ID NO: 662 - protein, 11 aa, Homo sapiens
  TCR CDR3
CVVNRNNDMRF

SEQ ID NO: 663 - protein, 11 aa, Homo sapiens
  TCR CDR3
CAVNKRDRLMF

SEQ ID NO: 664 - protein, 19 aa, Homo sapiens
  TCR CDR3
CASSPIKDTRQEYTGELFF

SEQ ID NO: 665 - protein, 12 aa, Homo sapiens
  TCR CDR3
CASSLGGTEAFF

SEQ ID NO: 666 - protein, 14 aa, Homo sapiens
  TCR CDR3
CASSLGAGGTEAFF

SEQ ID NO: 667 - protein, 13 aa, Homo sapiens
  TCR CDR3
CASSLGGNTEAFF

SEQ ID NO: 668 - protein, 14 aa, Homo sapiens
  TCR CDR3
CASSFRSNSYEQYF

SEQ ID NO: 669 - protein, 15 aa, Homo sapiens
  TCR CDR3
CASSSKGGGQQTQYF

SEQ ID NO: 670 - protein, 14 aa, Homo sapiens
  TCR CDR3
CASSSGRNTGELFF

SEQ ID NO: 671 - protein, 11 aa, Homo sapiens
  TCR CDR3
CASSPDIEAFF

SEQ ID NO: 672 - protein, 13 aa, Homo sapiens
  TCR CDR3
CASGDLNTGELFF

SEQ ID NO: 673 - protein, 16 aa, Homo sapiens
  TCR CDR3
CASSPVAGGNTGELFF

SEQ ID NO: 674 - protein, 16 aa, Homo sapiens
  TCR CDR3
CSARDQQGQNTGELFF

SEQ ID NO: 675 - protein, 11 aa, Homo sapiens
  TCR CDR3
CASSPDIEQFF

SEQ ID NO: 676 - protein, 13 aa, Homo sapiens
  TCR CDR3
CAGQGLNTGELFF

SEQ ID NO: 677 - protein, 13 aa, Homo sapiens
  TCR CDR3
CASQDINTGELFF

SEQ ID NO: 678 - protein, 14 aa, Homo sapiens
  TCR CDR3
CSVSRDRNTGELFF

SEQ ID NO: 679 - protein, 10 aa, Artificial Sequence
  Description of Artificial Sequence: Synthetic peptide
  SARS-CoV-2 epitope
RLFARTRSMW

SEQ ID NO: 680 - protein, 10 aa, Artificial Sequence
  Description of Artificial Sequence: Synthetic peptide
  SARS-CoV-2 epitope
QSAPHGVVFL

SEQ ID NO: 681 - protein, 10 aa, Artificial Sequence
  Description of Artificial Sequence: Synthetic peptide
  SARS-CoV-2 epitope
RKHFSMMILS

SEQ ID NO: 682 - protein, 14 aa, Artificial Sequence
  Description of Artificial Sequence: Synthetic peptide
  TCR CDR3
CAVSLNNAGNMLTF

SEQ ID NO: 683 - protein, 12 aa, Artificial Sequence
  Description of Artificial Sequence: Synthetic peptide
  TCR CDR3
CATDTGRRALTF

SEQ ID NO: 684 - protein, 14 aa, Artificial Sequence
  Description of Artificial Sequence: Synthetic peptide
  TCR CDR3
CGTWEDQGAQKLVF

SEQ ID NO: 685 - protein, 15 aa, Artificial Sequence
  Description of Artificial Sequence: Synthetic peptide
  TCR CDR3
CASSQETAGVNEQFF

SEQ ID NO: 686 - protein, 14 aa, Artificial Sequence
  Description of Artificial Sequence: Synthetic peptide
  TCR CDR3
CASSLGQGDTEAFF

SEQ ID NO: 687 - protein, 15 aa, Artificial Sequence
  Description of Artificial Sequence: Synthetic peptide
  TCR CDR3
CASSLAQGPYNEQFF

SEQ ID NO: 688 - protein, 17 aa, Artificial Sequence
  Description of Artificial Sequence: Synthetic peptide
  SARS-CoV-2 epitope
NAQALNTLVKQLSSNFG

SEQ ID NO: 689 - protein, 15 aa, Artificial Sequence
  Description of Artificial Sequence: Synthetic peptide
  SARS-CoV-2 epitope
IPTNFTISVTTEILP

SEQ ID NO: 690 - protein, 21 aa, Artificial Sequence
  Description of Artificial Sequence: Synthetic peptide
  SARS-CoV-2 epitope
SGTWLTYTGAIKLDDKDPNFK

SEQ ID NO: 691 - protein, 22 aa, Artificial Sequence
  Description of Artificial Sequence: Synthetic peptide
  SARS-CoV-2 epitope
ASFSTFKCYGVSPTKLNDLCFT

SEQ ID NO: 692 - protein, 15 aa, Artificial Sequence
  Description of Artificial Sequence: Synthetic peptide
  SARS-CoV-2 epitope
LSYYKLGASQRVAGD

SEQ ID NO: 693 - protein, 22 aa, Artificial Sequence
  Description of Artificial Sequence: Synthetic peptide
  SARS-CoV-2 epitope
LLLLDRLNQLESKMSGKGQQQQ

SEQ ID NO: 694 - protein, 20 aa, Artificial Sequence
  Description of Artificial Sequence: Synthetic peptide
  SARS-CoV-2 epitope
RGHLRIAGHHLGRCDIKDLP

SEQ ID NO: 695 - protein, 13 aa, Artificial Sequence
  Description of Artificial Sequence: Synthetic peptide
  SARS-CoV-2 epitope
DQVILLNKHIDAY

SEQ ID NO: 696 - protein, 15 aa, Artificial Sequence
  Description of Artificial Sequence: Synthetic peptide
  SARS-CoV-2 epitope
YTNSFTRGVYYPDKV

SEQ ID NO: 697 - protein, 15 aa, Artificial Sequence
  Description of Artificial Sequence: Synthetic peptide
  SARS-CoV-2 epitope
VFRSSVLHSTQDLFL

SEQ ID NO: 698 - protein, 15 aa, Artificial Sequence
  Description of Artificial Sequence: Synthetic peptide
  SARS-CoV-2 epitope
DSKTQSLLIVNNATN

SEQ ID NO: 699 - protein, 15 aa, Artificial Sequence
  Description of Artificial Sequence: Synthetic peptide
  SARS-CoV-2 epitope
KIYSKHTPINLVRDL

SEQ ID NO: 700 - protein, 15 aa, Artificial Sequence
  Description of Artificial Sequence: Synthetic peptide
  SARS-CoV-2 epitope
NFRVQPTESIVRFPN

SEQ ID NO: 701 - protein, 15 aa, Artificial Sequence
  Description of Artificial Sequence: Synthetic peptide
  SARS-CoV-2 epitope
NVYADSFVIRGDEVR

SEQ ID NO: 702 - protein, 15 aa, Artificial Sequence
  Description of Artificial Sequence: Synthetic peptide
  SARS-CoV-2 epitope
SPRRARSVASQSIIA

SEQ ID NO: 703 - protein, 15 aa, Artificial Sequence
  Description of Artificial Sequence: Synthetic peptide
  SARS-CoV-2 epitope
VASQSIIAYTMSLGA

SEQ ID NO: 704 - protein, 15 aa, Artificial Sequence
  Description of Artificial Sequence: Synthetic peptide
  SARS-CoV-2 epitope
SIIAYTMSLGAENSV

SEQ ID NO: 705 - protein, 15 aa, Artificial Sequence
  Description of Artificial Sequence: Synthetic peptide
  SARS-CoV-2 epitope
YTMSLGAENSVAYSN

SEQ ID NO: 706 - protein, 15 aa, Artificial Sequence
  Description of Artificial Sequence: Synthetic peptide
  SARS-CoV-2 epitope
SVAYSNNSIAIPTNF

SEQ ID NO: 707 - protein, 15 aa, Artificial Sequence
  Description of Artificial Sequence: Synthetic peptide
  SARS-CoV-2 epitope
QYTSALLAGTITSGW

SEQ ID NO: 708 - protein, 15 aa, Artificial Sequence
  Description of Artificial Sequence: Synthetic peptide
  SARS-CoV-2 epitope
IRASANLAATKMSEC

SEQ ID NO: 709 - protein, 15 aa, Artificial Sequence
  Description of Artificial Sequence: Synthetic peptide
  SARS-CoV-2 epitope
YIRVGARKSAPLIEL

SEQ ID NO: 710 - protein, 15 aa, Artificial Sequence
  Description of Artificial Sequence: Synthetic peptide
  SARS-CoV-2 epitope
KHVYQLRARSVSPKL

SEQ ID NO: 711 - protein, 15 aa, Artificial Sequence
  Description of Artificial Sequence: Synthetic peptide
  SARS-CoV-2 epitope
PSDFVRATATIPIQA

SEQ ID NO: 712 - protein, 15 aa, Artificial Sequence
  Description of Artificial Sequence: Synthetic peptide
  SARS-CoV-2 epitope
KKRWQLALSKGVHFV

SEQ ID NO: 713 - protein, 15 aa, Artificial Sequence
  Description of Artificial Sequence: Synthetic peptide
  SARS-CoV-2 epitope
GVVNPVMEPIYDEPT

SEQ ID NO: 714 - protein, 15 aa, Artificial Sequence
  Description of Artificial Sequence: Synthetic peptide
  SARS-CoV-2 epitope
SYELQTPFEIKLAKK

SEQ ID NO: 715 - protein, 15 aa, Artificial Sequence
  Description of Artificial Sequence: Synthetic peptide
  SARS-CoV-2 epitope
NFVFPLNSIIKTIQP

SEQ ID NO: 716 - protein, 15 aa, Artificial Sequence
  Description of Artificial Sequence: Synthetic peptide
  SARS-CoV-2 epitope
GRIRSVYPVASPNEC

SEQ ID NO: 717 - protein, 15 aa, Artificial Sequence
  Description of Artificial Sequence: Synthetic peptide
  SARS-CoV-2 epitope
ASFSASTSAFVETVK

SEQ ID NO: 718 - protein, 15 aa, Artificial Sequence
  Description of Artificial Sequence: Synthetic peptide
  SARS-CoV-2 epitope
KKGAWNIGEQKSILS

SEQ ID NO: 719 - protein, 15 aa, Artificial Sequence
  Description of Artificial Sequence: Synthetic peptide
  SARS-CoV-2 epitope
RVVRSIFSRTLETAQ

SEQ ID NO: 720 - protein, 15 aa, Artificial Sequence
  Description of Artificial Sequence: Synthetic peptide
  SARS-CoV-2 epitope
RVLQKAAITILDGIS

SEQ ID NO: 721 - protein, 15 aa, Artificial Sequence
  Description of Artificial Sequence: Synthetic peptide
  SARS-CoV-2 epitope
LRLIDAMMFTSDLAT

SEQ ID NO: 722 - protein, 15 aa, Artificial Sequence
  Description of Artificial Sequence: Synthetic peptide
  SARS-CoV-2 epitope
KYCALAPNMMVTNNT

SEQ ID NO: 723 - protein, 15 aa, Artificial Sequence
  Description of Artificial Sequence: Synthetic peptide
  SARS-CoV-2 epitope
LEFGATSAALQPEEE

SEQ ID NO: 724 - protein, 15 aa, Artificial Sequence
  Description of Artificial Sequence: Synthetic peptide
  SARS-CoV-2 epitope
TVVVNAANVYLKHGG

SEQ ID NO: 725 - protein, 15 aa, Artificial Sequence
  Description of Artificial Sequence: Synthetic peptide
  SARS-CoV-2 epitope
ALNKATNNAMQVESD

SEQ ID NO: 726 - protein, 15 aa, Artificial Sequence
  Description of Artificial Sequence: Synthetic peptide
  SARS-CoV-2 epitope
YENFNQHEVLLAPLL

SEQ ID NO: 727 - protein, 15 aa, Artificial Sequence
  Description of Artificial Sequence: Synthetic peptide
  SARS-CoV-2 epitope
NVYLAVFDKNLYDKL

SEQ ID NO: 728 - protein, 15 aa, Artificial Sequence
  Description of Artificial Sequence: Synthetic peptide
  SARS-CoV-2 epitope
KPFITESKPSVEQRK

SEQ ID NO: 729 - protein, 15 aa, Artificial Sequence
  Description of Artificial Sequence: Synthetic peptide
  SARS-CoV-2 epitope
TFLKKDAPYIVGDVV

SEQ ID NO: 730 - protein, 15 aa, Artificial Sequence
  Description of Artificial Sequence: Synthetic peptide
  SARS-CoV-2 epitope
LRKVPTDNYITTYPG

SEQ ID NO: 731 - protein, 15 aa, Artificial Sequence
  Description of Artificial Sequence: Synthetic peptide
  SARS-CoV-2 epitope
FYILPSIISNEKQEI

SEQ ID NO: 732 - protein, 15 aa, Artificial Sequence
  Description of Artificial Sequence: Synthetic peptide
  SARS-CoV-2 epitope
IQRKYKGIKIQEGVV

SEQ ID NO: 733 - protein, 15 aa, Artificial Sequence
  Description of Artificial Sequence: Synthetic peptide
  SARS-CoV-2 epitope
YTSKTTVASLINTLN

SEQ ID NO: 734 - protein, 15 aa, Artificial Sequence
  Description of Artificial Sequence: Synthetic peptide
  SARS-CoV-2 epitope
EEAARYMRSLKVPAT

SEQ ID NO: 735 - protein, 15 aa, Artificial Sequence
  Description of Artificial Sequence: Synthetic peptide
  SARS-CoV-2 epitope
KSVYYTSNPTTFHLD

SEQ ID NO: 736 - protein, 15 aa, Artificial Sequence
  Description of Artificial Sequence: Synthetic peptide
  SARS-CoV-2 epitope
DVRETMSYLFQHANL

SEQ ID NO: 737 - protein, 15 aa, Artificial Sequence
  Description of Artificial Sequence: Synthetic peptide
  SARS-CoV-2 epitope
KLLHKPIVWHVNNAT

SEQ ID NO: 738 - protein, 15 aa, Artificial Sequence
  Description of Artificial Sequence: Synthetic peptide
  SARS-CoV-2 epitope
ILKPANNSLKITEEV

SEQ ID NO: 739 - protein, 15 aa, Artificial Sequence
  Description of Artificial Sequence: Synthetic peptide
  SARS-CoV-2 epitope
NELSRVLGLKTLATH

SEQ ID NO: 740 - protein, 15 aa, Artificial Sequence
  Description of Artificial Sequence: Synthetic peptide
  SARS-CoV-2 epitope
RIKASMPTTIAKNTV

SEQ ID NO: 741 - protein, 15 aa, Artificial Sequence
  Description of Artificial Sequence: Synthetic peptide
  SARS-CoV-2 epitope
IINLVQMAPISAMVR

SEQ ID NO: 742 - protein, 15 aa, Artificial Sequence
  Description of Artificial Sequence: Synthetic peptide
  SARS-CoV-2 epitope
VNTFSSTFNVPMEKL

SEQ ID NO: 743 - protein, 15 aa, Artificial Sequence
  Description of Artificial Sequence: Synthetic peptide
  SARS-CoV-2 epitope
KLSHQSDIEVTGDSC

SEQ ID NO: 744 - protein, 15 aa, Artificial Sequence
  Description of Artificial Sequence: Synthetic peptide
  SARS-CoV-2 epitope
HINAQVAKSHNIALI

SEQ ID NO: 745 - protein, 15 aa, Artificial Sequence
  Description of Artificial Sequence: Synthetic peptide
  SARS-CoV-2 epitope
RQVVNVVTTKIALKG

SEQ ID NO: 746 - protein, 15 aa, Artificial Sequence
  Description of Artificial Sequence: Synthetic peptide
  SARS-CoV-2 epitope
IAAVITREVGFVVPG

SEQ ID NO: 747 - protein, 15 aa, Artificial Sequence
  Description of Artificial Sequence: Synthetic peptide
  SARS-CoV-2 epitope
VFSAVGNICYTPSKL

SEQ ID NO: 748 - protein, 15 aa, Artificial Sequence
  Description of Artificial Sequence: Synthetic peptide
  SARS-CoV-2 epitope
ICYTPSKLIEYTDFA

SEQ ID NO: 749 - protein, 15 aa, Artificial Sequence
  Description of Artificial Sequence: Synthetic peptide
  SARS-CoV-2 epitope
PLIQPIGALDISASI

SEQ ID NO: 750 - protein, 15 aa, Artificial Sequence
  Description of Artificial Sequence: Synthetic peptide
  SARS-CoV-2 epitope
ALDISASIVAGGIVA

SEQ ID NO: 751 - protein, 15 aa, Artificial Sequence
  Description of Artificial Sequence: Synthetic peptide
  SARS-CoV-2 epitope
FSNSGSDVLYQPPQT

SEQ ID NO: 752 - protein, 15 aa, Artificial Sequence
  Description of Artificial Sequence: Synthetic peptide
  SARS-CoV-2 epitope
QTSITSAVLQSGFRK

SEQ ID NO: 753 - protein, 15 aa, Artificial Sequence
  Description of Artificial Sequence: Synthetic peptide
  SARS-CoV-2 epitope
NFLVQAGNVQLRVIG

SEQ ID NO: 754 - protein, 15 aa, Artificial Sequence
  Description of Artificial Sequence: Synthetic peptide
  SARS-CoV-2 epitope
KKLKKSLNVAKSEFD

SEQ ID NO: 755 - protein, 15 aa, Artificial Sequence
  Description of Artificial Sequence: Synthetic peptide
  SARS-CoV-2 epitope
IIPLTTAAKLMVVIP

SEQ ID NO: 756 - protein, 15 aa, Artificial Sequence
  Description of Artificial Sequence: Synthetic peptide
  SARS-CoV-2 epitope
LIVTALRANSAVKLQ

SEQ ID NO: 757 - protein, 15 aa, Artificial Sequence
  Description of Artificial Sequence: Synthetic peptide
  SARS-CoV-2 epitope
MVPHISRQRLTKYTM

SEQ ID NO: 758 - protein, 15 aa, Artificial Sequence
  Description of Artificial Sequence: Synthetic peptide
  SARS-CoV-2 epitope
DFIQTTPGSGVPVVD

SEQ ID NO: 759 - protein, 15 aa, Artificial Sequence
  Description of Artificial Sequence: Synthetic peptide
  SARS-CoV-2 epitope
ILTLTRALTAESHVD

SEQ ID NO: 760 - protein, 15 aa, Artificial Sequence
  Description of Artificial Sequence: Synthetic peptide
  SARS-CoV-2 epitope
FVVSTGYHFRELGVV

SEQ ID NO: 761 - protein, 15 aa, Artificial Sequence
  Description of Artificial Sequence: Synthetic peptide
  SARS-CoV-2 epitope
TNNVAFQTVKPGNFN

SEQ ID NO: 762 - protein, 15 aa, Artificial Sequence
  Description of Artificial Sequence: Synthetic peptide
  SARS-CoV-2 epitope
DFAVSKGFFKEGSSV

SEQ ID NO: 763 - protein, 15 aa, Artificial Sequence
  Description of Artificial Sequence: Synthetic peptide
  SARS-CoV-2 epitope
QDALFAYTKRNVIPT

SEQ ID NO: 764 - protein, 15 aa, Artificial Sequence
  Description of Artificial Sequence: Synthetic peptide
  SARS-CoV-2 epitope
NALLSTDGNKIADKY

SEQ ID NO: 765 - protein, 15 aa, Artificial Sequence
  Description of Artificial Sequence: Synthetic peptide
  SARS-CoV-2 epitope
AYLRKHFSMMILSDD

SEQ ID NO: 766 - protein, 15 aa, Artificial Sequence
  Description of Artificial Sequence: Synthetic peptide
  SARS-CoV-2 epitope
CFNSTYASQGLVASI

SEQ ID NO: 767 - protein, 15 aa, Artificial Sequence
  Description of Artificial Sequence: Synthetic peptide
  SARS-CoV-2 epitope
ASIKNFKSVLYYQNN

SEQ ID NO: 768 - protein, 15 aa, Artificial Sequence
  Description of Artificial Sequence: Synthetic peptide
  SARS-CoV-2 epitope
ERFVSLAIDAYPLTK

SEQ ID NO: 769 - protein, 15 aa, Artificial Sequence
  Description of Artificial Sequence: Synthetic peptide
  SARS-CoV-2 epitope
DAYPLTKHPNQEYAD

SEQ ID NO: 770 - protein, 15 aa, Artificial Sequence
  Description of Artificial Sequence: Synthetic peptide
  SARS-CoV-2 epitope
DHVISTSHKLVLSVN

SEQ ID NO: 771 - protein, 15 aa, Artificial Sequence
  Description of Artificial Sequence: Synthetic peptide
  SARS-CoV-2 epitope
TFKLSYGIATVREVL

SEQ ID NO: 772 - protein, 15 aa, Artificial Sequence
  Description of Artificial Sequence: Synthetic peptide
  SARS-CoV-2 epitope
TGYRVTKNSKVQIGE

SEQ ID NO: 773 - protein, 15 aa, Artificial Sequence
  Description of Artificial Sequence: Synthetic peptide
  SARS-CoV-2 epitope
YFVLTSHTVMPLSAP

SEQ ID NO: 774 - protein, 15 aa, Artificial Sequence
  Description of Artificial Sequence: Synthetic peptide
  SARS-CoV-2 epitope
YVRITGLYPTLNISD

SEQ ID NO: 775 - protein, 15 aa, Artificial Sequence
  Description of Artificial Sequence: Synthetic peptide
  SARS-CoV-2 epitope
IVDTVSALVYDNKLK

SEQ ID NO: 776 - protein, 15 aa, Artificial Sequence
  Description of Artificial Sequence: Synthetic peptide
  SARS-CoV-2 epitope
MFYKGVITHDVSSAI

SEQ ID NO: 777 - protein, 15 aa, Artificial Sequence
  Description of Artificial Sequence: Synthetic peptide
  SARS-CoV-2 epitope
QHMVVKAALLADKFP

SEQ ID NO: 778 - protein, 15 aa, Artificial Sequence
  Description of Artificial Sequence: Synthetic peptide
  SARS-CoV-2 epitope
KRNIKPVPEVKILNN

SEQ ID NO: 779 - protein, 15 aa, Artificial Sequence
  Description of Artificial Sequence: Synthetic peptide
  SARS-CoV-2 epitope
VKILNNLGVDIAANT

SEQ ID NO: 780 - protein, 15 aa, Artificial Sequence
  Description of Artificial Sequence: Synthetic peptide
  SARS-CoV-2 epitope
LFRNARNGVLITEGS

SEQ ID NO: 781 - protein, 15 aa, Artificial Sequence
  Description of Artificial Sequence: Synthetic peptide
  SARS-CoV-2 epitope
LPETYFTQSRNLQEF

SEQ ID NO: 782 - protein, 15 aa, Artificial Sequence
  Description of Artificial Sequence: Synthetic peptide
  SARS-CoV-2 epitope
YGDFSHSQLGGLHLL

SEQ ID NO: 783 - protein, 15 aa, Artificial Sequence
  Description of Artificial Sequence: Synthetic peptide
  SARS-CoV-2 epitope
QYLNTLTLAVPYNMR

SEQ ID NO: 784 - protein, 15 aa, Artificial Sequence
  Description of Artificial Sequence: Synthetic peptide
  SARS-CoV-2 epitope
RQWLPTGTLLVDSDL

SEQ ID NO: 785 - protein, 15 aa, Artificial Sequence
  Description of Artificial Sequence: Synthetic peptide
  SARS-CoV-2 epitope
QKLALGGSVAIKITE

SEQ ID NO: 786 - protein, 15 aa, Artificial Sequence
  Description of Artificial Sequence: Synthetic peptide
  SARS-CoV-2 epitope
HANYIFWRNTNPIQL

SEQ ID NO: 787 - protein, 15 aa, Artificial Sequence
  Description of Artificial Sequence: Synthetic peptide
  SARS-CoV-2 epitope
KFPLKLRGTAVMSLK

SEQ ID NO: 788 - protein, 15 aa, Artificial Sequence
  Description of Artificial Sequence: Synthetic peptide
  SARS-CoV-2 epitope
DLKFPRGQGVPINTN

SEQ ID NO: 789 - protein, 15 aa, Artificial Sequence
  Description of Artificial Sequence: Synthetic peptide
  SARS-CoV-2 epitope
TATKAYNVTQAFGRR

SEQ ID NO: 790 - protein, 15 aa, Artificial Sequence
  Description of Artificial Sequence: Synthetic peptide
  SARS-CoV-2 epitope
AQFAPSASAFFGMSR

SEQ ID NO: 791 - protein, 15 aa, Artificial Sequence
  Description of Artificial Sequence: Synthetic peptide
  SARS-CoV-2 epitope
EVTPSGTWLTYTGAI

SEQ ID NO: 792 - protein, 15 aa, Artificial Sequence
  Description of Artificial Sequence: Synthetic peptide
  SARS-CoV-2 epitope
WLTYTGAIKLDDKDP

SEQ ID NO: 793 - protein, 15 aa, Artificial Sequence
  Description of Artificial Sequence: Synthetic peptide
  SARS-CoV-2 epitope
ETQALPQRQKKQQTV

SEQ ID NO: 794 - protein, 15 aa, Artificial Sequence
  Description of Artificial Sequence: Synthetic peptide
  SARS-CoV-2 epitope
PKEITVATSRTLSYY

SEQ ID NO: 795 - protein, 15 aa, Artificial Sequence
  Description of Artificial Sequence: Synthetic peptide
  SARS-CoV-2 epitope
SRVKNLNSSRVPDLL

SEQ ID NO: 796 - protein, 15 aa, Artificial Sequence
  Description of Artificial Sequence: Synthetic peptide
  SARS-CoV-2 epitope
VYFASTEKSNIIRGW

SEQ ID NO: 797 - protein, 15 aa, Artificial Sequence
  Description of Artificial Sequence: Synthetic peptide
  SARS-CoV-2 epitope
NLVKNKCVNFNFNGL

SEQ ID NO: 798 - protein, 15 aa, Artificial Sequence
  Description of Artificial Sequence: Synthetic peptide
  SARS-CoV-2 epitope
DLLFNKVTLADAGFI

SEQ ID NO: 799 - protein, 15 aa, Artificial Sequence
  Description of Artificial Sequence: Synthetic peptide
  SARS-CoV-2 epitope
LGKLQDVVNQNAQAL

SEQ ID NO: 800 - protein, 15 aa, Artificial Sequence
  Description of Artificial Sequence: Synthetic peptide
  SARS-CoV-2 epitope
QNAQALNTLVKQLSS

SEQ ID NO: 801 - protein, 15 aa, Artificial Sequence
  Description of Artificial Sequence: Synthetic peptide
  SARS-CoV-2 epitope
IDRLITGRLQSLQTY

SEQ ID NO: 802 - protein, 15 aa, Artificial Sequence
  Description of Artificial Sequence: Synthetic peptide
  SARS-CoV-2 epitope
RLQSLQTYVTQQLIR

SEQ ID NO: 803 - protein, 15 aa, Artificial Sequence
  Description of Artificial Sequence: Synthetic peptide
  SARS-CoV-2 epitope
FPQSAPHGVVFLHVT

SEQ ID NO: 804 - protein, 15 aa, Artificial Sequence
  Description of Artificial Sequence: Synthetic peptide
  SARS-CoV-2 epitope
CLPFTINCQEPKLGS

SEQ ID NO: 805 - protein, 15 aa, Artificial Sequence
  Description of Artificial Sequence: Synthetic peptide
  SARS-CoV-2 epitope
LFIRQEEVQELYSPI

SEQ ID NO: 806 - protein, 15 aa, Artificial Sequence
  Description of Artificial Sequence: Synthetic peptide
  SARS-CoV-2 epitope
ALLAVFQSASKIITL

SEQ ID NO: 807 - protein, 15 aa, Artificial Sequence
  Description of Artificial Sequence: Synthetic peptide
  SARS-CoV-2 epitope
YYQLYSTQLSTDTGV

SEQ ID NO: 808 - protein, 15 aa, Artificial Sequence
  Description of Artificial Sequence: Synthetic peptide
  SARS-CoV-2 epitope
PVMEPIYDEPTTTTS

SEQ ID NO: 809 - protein, 15 aa, Artificial Sequence
  Description of Artificial Sequence: Synthetic peptide
  SARS-CoV-2 epitope
TLGVLVPHVGEIPVA

SEQ ID NO: 810 - protein, 15 aa, Artificial Sequence
  Description of Artificial Sequence: Synthetic peptide
  SARS-CoV-2 epitope
PLECIKDLLARAGKA

SEQ ID NO: 811 - protein, 15 aa, Artificial Sequence
  Description of Artificial Sequence: Synthetic peptide
  SARS-CoV-2 epitope
VESCGNFKVTKGKAK

SEQ ID NO: 812 - protein, 15 aa, Artificial Sequence
  Description of Artificial Sequence: Synthetic peptide
  SARS-CoV-2 epitope
KALNLGETFVTHSKG

SEQ ID NO: 813 - protein, 15 aa, Artificial Sequence
  Description of Artificial Sequence: Synthetic peptide
  SARS-CoV-2 epitope
IVEEAKKVKPTVVVN

SEQ ID NO: 814 - protein, 15 aa, Artificial Sequence
  Description of Artificial Sequence: Synthetic peptide
  SARS-CoV-2 epitope
APLLSAGIFGADPIH

SEQ ID NO: 815 - protein, 15 aa, Artificial Sequence
  Description of Artificial Sequence: Synthetic peptide
  SARS-CoV-2 epitope
TAVVIPTKKAGGTTE

SEQ ID NO: 816 - protein, 15 aa, Artificial Sequence
  Description of Artificial Sequence: Synthetic peptide
  SARS-CoV-2 epitope
CKSAFYILPSIISNE

SEQ ID NO: 817 - protein, 15 aa, Artificial Sequence
  Description of Artificial Sequence: Synthetic peptide
  SARS-CoV-2 epitope
ETKAIVSTIQRKYKG

SEQ ID NO: 818 - protein, 15 aa, Artificial Sequence
  Description of Artificial Sequence: Synthetic peptide
  SARS-CoV-2 epitope
TSKTTVASLINTLND

SEQ ID NO: 819 - protein, 15 aa, Artificial Sequence
  Description of Artificial Sequence: Synthetic peptide
  SARS-CoV-2 epitope
HFIETISLAGSYKDW

SEQ ID NO: 820 - protein, 15 aa, Artificial Sequence
  Description of Artificial Sequence: Synthetic peptide
  SARS-CoV-2 epitope
LGRYMSALNHTKKWK

SEQ ID NO: 821 - protein, 15 aa, Artificial Sequence
  Description of Artificial Sequence: Synthetic peptide
  SARS-CoV-2 epitope
VQQESPFVMMSAPPA

SEQ ID NO: 822 - protein, 15 aa, Artificial Sequence
  Description of Artificial Sequence: Synthetic peptide
  SARS-CoV-2 epitope
IKPVTYKLDGVVCTE

SEQ ID NO: 823 - protein, 15 aa, Artificial Sequence
  Description of Artificial Sequence: Synthetic peptide
  SARS-CoV-2 epitope
VETSNSFDVLKSEDA

SEQ ID NO: 824 - protein, 15 aa, Artificial Sequence
  Description of Artificial Sequence: Synthetic peptide
  SARS-CoV-2 epitope
PVSEEVVENPTIQKD

SEQ ID NO: 825 - protein, 15 aa, Artificial Sequence
  Description of Artificial Sequence: Synthetic peptide
  SARS-CoV-2 epitope
DIILKPANNSLKITE

SEQ ID NO: 826 - protein, 15 aa, Artificial Sequence
  Description of Artificial Sequence: Synthetic peptide
  SARS-CoV-2 epitope
NELSRVLGLKTLATH

SEQ ID NO: 827 - protein, 15 aa, Artificial Sequence
  Description of Artificial Sequence: Synthetic peptide
  SARS-CoV-2 epitope
TFTRSTNSRIKASMP

SEQ ID NO: 828 - protein, 15 aa, Artificial Sequence
  Description of Artificial Sequence: Synthetic peptide
  SARS-CoV-2 epitope
SLIYSTAALGVLMSN

SEQ ID NO: 829 - protein, 15 aa, Artificial Sequence
  Description of Artificial Sequence: Synthetic peptide
  SARS-CoV-2 epitope
DLSLQFKRPINPTDQ

SEQ ID NO: 830 - protein, 15 aa, Artificial Sequence
  Description of Artificial Sequence: Synthetic peptide
  SARS-CoV-2 epitope
HSLSHFVNLDNLRAN

SEQ ID NO: 831 - protein, 15 aa, Artificial Sequence
  Description of Artificial Sequence: Synthetic peptide
  SARS-CoV-2 epitope
VKMFDAYVNTFSSTF

SEQ ID NO: 832 - protein, 15 aa, Artificial Sequence
  Description of Artificial Sequence: Synthetic peptide
  SARS-CoV-2 epitope
KTLVATAEAELAKNV

SEQ ID NO: 833 - protein, 15 aa, Artificial Sequence
  Description of Artificial Sequence: Synthetic peptide
  SARS-CoV-2 epitope
LIWNVKDFMSLSEQL

SEQ ID NO: 834 - protein, 15 aa, Artificial Sequence
  Description of Artificial Sequence: Synthetic peptide
  SARS-CoV-2 epitope
QVVNVVTTKIALKGG

SEQ ID NO: 835 - protein, 15 aa, Artificial Sequence
  Description of Artificial Sequence: Synthetic peptide
  SARS-CoV-2 epitope
LIQPIGALDISASIV

SEQ ID NO: 836 - protein, 15 aa, Artificial Sequence
  Description of Artificial Sequence: Synthetic peptide
  SARS-CoV-2 epitope
YLKRRVVFNGVSFST

SEQ ID NO: 837 - protein, 15 aa, Artificial Sequence
  Description of Artificial Sequence: Synthetic peptide
  SARS-CoV-2 epitope
AKALNDFSNSGSDVL

SEQ ID NO: 838 - protein, 15 aa, Artificial Sequence
  Description of Artificial Sequence: Synthetic peptide
  SARS-CoV-2 epitope
CVLKLKVDTANPKTP

SEQ ID NO: 839 - protein, 15 aa, Artificial Sequence
  Description of Artificial Sequence: Synthetic peptide
  SARS-CoV-2 epitope
KYKFVRIQPGQTFSV

SEQ ID NO: 840 - protein, 15 aa, Artificial Sequence
  Description of Artificial Sequence: Synthetic peptide
  SARS-CoV-2 epitope
LEDEFTPFDVVRQCS

SEQ ID NO: 841 - protein, 15 aa, Artificial Sequence
  Description of Artificial Sequence: Synthetic peptide
  SARS-CoV-2 epitope
ATVAYFNMVYMPASW

SEQ ID NO: 842 - protein, 15 aa, Artificial Sequence
  Description of Artificial Sequence: Synthetic peptide
  SARS-CoV-2 epitope
GGKPCIKVATVQSKM

SEQ ID NO: 843 - protein, 15 aa, Artificial Sequence
  Description of Artificial Sequence: Synthetic peptide
  SARS-CoV-2 epitope
FSSLPSYAAFATAQE

SEQ ID NO: 844 - protein, 15 aa, Artificial Sequence
  Description of Artificial Sequence: Synthetic peptide
  SARS-CoV-2 epitope
PLNIIPLTTAAKLMV

SEQ ID NO: 845 - protein, 15 aa, Artificial Sequence
  Description of Artificial Sequence: Synthetic peptide
  SARS-CoV-2 epitope
PDYNTYKNTCDGTTF

SEQ ID NO: 846 - protein, 15 aa, Artificial Sequence
  Description of Artificial Sequence: Synthetic peptide
  SARS-CoV-2 epitope
AVKLQNNELSPVALR

SEQ ID NO: 847 - protein, 15 aa, Artificial Sequence
  Description of Artificial Sequence: Synthetic peptide
  SARS-CoV-2 epitope
ALRQMSCAAGTTQTA

SEQ ID NO: 848 - protein, 15 aa, Artificial Sequence
  Description of Artificial Sequence: Synthetic peptide
  SARS-CoV-2 epitope
ALAYYNTTKGGRFVL

SEQ ID NO: 849 - protein, 15 aa, Artificial Sequence
  Description of Artificial Sequence: Synthetic peptide
  SARS-CoV-2 epitope
ETIYNLLKDCPAVAK

SEQ ID NO: 850 - protein, 15 aa, Artificial Sequence
  Description of Artificial Sequence: Synthetic peptide
  SARS-CoV-2 epitope
ILRVYANLGERVRQA

SEQ ID NO: 851 - protein, 15 aa, Artificial Sequence
  Description of Artificial Sequence: Synthetic peptide
  SARS-CoV-2 epitope
VDSYYSLLMPILTLT

SEQ ID NO: 852 - protein, 15 aa, Artificial Sequence
  Description of Artificial Sequence: Synthetic peptide
  SARS-CoV-2 epitope
PILTLTRALTAESHV

SEQ ID NO: 853 - protein, 15 aa, Artificial Sequence
  Description of Artificial Sequence: Synthetic peptide
  SARS-CoV-2 epitope
LGVVHNQDVNLHSSR

SEQ ID NO: 854 - protein, 15 aa, Artificial Sequence
  Description of Artificial Sequence: Synthetic peptide
  SARS-CoV-2 epitope
VIPTITQMNLKYAIS

SEQ ID NO: 855 - protein, 15 aa, Artificial Sequence
  Description of Artificial Sequence: Synthetic peptide
  SARS-CoV-2 epitope
FHQKLLKSIAATRGA

SEQ ID NO: 856 - protein, 15 aa, Artificial Sequence
  Description of Artificial Sequence: Synthetic peptide
  SARS-CoV-2 epitope
VFNICQAVTANVNAL

SEQ ID NO: 857 - protein, 15 aa, Artificial Sequence
  Description of Artificial Sequence: Synthetic peptide
  SARS-CoV-2 epitope
VASIKNFKSVLYYQN

SEQ ID NO: 858 - protein, 15 aa, Artificial Sequence
  Description of Artificial Sequence: Synthetic peptide
  SARS-CoV-2 epitope
STSHKLVLSVNPYVC

SEQ ID NO: 859 - protein, 15 aa, Artificial Sequence
  Description of Artificial Sequence: Synthetic peptide
  SARS-CoV-2 epitope
LANTCTERLKLFAAE

SEQ ID NO: 860 - protein, 15 aa, Artificial Sequence
  Description of Artificial Sequence: Synthetic peptide
  SARS-CoV-2 epitope
HTVMPLSAPTLVPQE

SEQ ID NO: 861 - protein, 15 aa, Artificial Sequence
  Description of Artificial Sequence: Synthetic peptide
  SARS-CoV-2 epitope
AVFISPYNSQNAVAS

SEQ ID NO: 862 - protein, 15 aa, Artificial Sequence
  Description of Artificial Sequence: Synthetic peptide
  SARS-CoV-2 epitope
LHPTQAPTHLSVDTK

SEQ ID NO: 863 - protein, 15 aa, Artificial Sequence
  Description of Artificial Sequence: Synthetic peptide
  SARS-CoV-2 epitope
LISMMGFKMNYQVNG

SEQ ID NO: 864 - protein, 15 aa, Artificial Sequence
  Description of Artificial Sequence: Synthetic peptide
  SARS-CoV-2 epitope
EAIRHVRAWIGFDVE

SEQ ID NO: 865 - protein, 15 aa, Artificial Sequence
  Description of Artificial Sequence: Synthetic peptide
  SARS-CoV-2 epitope
STGVNLVAVPTGYVD

SEQ ID NO: 866 - protein, 15 aa, Artificial Sequence
  Description of Artificial Sequence: Synthetic peptide
  SARS-CoV-2 epitope
FPVLHDIGNPKAIKC

SEQ ID NO: 867 - protein, 15 aa, Artificial Sequence
  Description of Artificial Sequence: Synthetic peptide
  SARS-CoV-2 epitope
KAIKCVPQADVEWKF

SEQ ID NO: 868 - protein, 15 aa, Artificial Sequence
  Description of Artificial Sequence: Synthetic peptide
  SARS-CoV-2 epitope
FDKSAFVNLKQLPFF

SEQ ID NO: 869 - protein, 15 aa, Artificial Sequence
  Description of Artificial Sequence: Synthetic peptide
  SARS-CoV-2 epitope
YNLWNTFTRLQSLEN

SEQ ID NO: 870 - protein, 15 aa, Artificial Sequence
  Description of Artificial Sequence: Synthetic peptide
  SARS-CoV-2 epitope
TRLQSLENVAFNVVN

SEQ ID NO: 871 - protein, 15 aa, Artificial Sequence
  Description of Artificial Sequence: Synthetic peptide
  SARS-CoV-2 epitope
PVPEVKILNNLGVDI

SEQ ID NO: 872 - protein, 15 aa, Artificial Sequence
  Description of Artificial Sequence: Synthetic peptide
  SARS-CoV-2 epitope
PAHISTIGVCSMTDI

SEQ ID NO: 873 - protein, 15 aa, Artificial Sequence
  Description of Artificial Sequence: Synthetic peptide
  SARS-CoV-2 epitope
TVKNYFITDAQTGSS

SEQ ID NO: 874 - protein, 15 aa, Artificial Sequence
  Description of Artificial Sequence: Synthetic peptide
  SARS-CoV-2 epitope
VEIIKSQDLSVVSKV

SEQ ID NO: 875 - protein, 15 aa, Artificial Sequence
  Description of Artificial Sequence: Synthetic peptide
  SARS-CoV-2 epitope
LNTLTLAVPYNMRVI

SEQ ID NO: 876 - protein, 15 aa, Artificial Sequence
  Description of Artificial Sequence: Synthetic peptide
  SARS-CoV-2 epitope
AFLIGCNYLGKPREQ

SEQ ID NO: 877 - protein, 15 aa, Artificial Sequence
  Description of Artificial Sequence: Synthetic peptide
  SARS-CoV-2 epitope
ANYIFWRNTNPIQLS

SEQ ID NO: 878 - protein, 15 aa, Artificial Sequence
  Description of Artificial Sequence: Synthetic peptide
  SARS-CoV-2 epitope
KFPLKLRGTAVMSLK

SEQ ID NO: 879 - protein, 15 aa, Artificial Sequence
  Description of Artificial Sequence: Synthetic peptide
  SARS-CoV-2 epitope
KGRLIIRENNRVVIS

SEQ ID NO: 880 - protein, 15 aa, Artificial Sequence
  Description of Artificial Sequence: Synthetic peptide
  SARS-CoV-2 epitope
NKDGIIWVATEGALN

SEQ ID NO: 881 - protein, 15 aa, Artificial Sequence
  Description of Artificial Sequence: Synthetic peptide
  SARS-CoV-2 epitope
ATKAYNVTQAFGRRG

SEQ ID NO: 882 - protein, 15 aa, Artificial Sequence
  Description of Artificial Sequence: Synthetic peptide
  SARS-CoV-2 epitope
PQIAQFAPSASAFFG

SEQ ID NO: 883 - protein, 15 aa, Artificial Sequence
  Description of Artificial Sequence: Synthetic peptide
  SARS-CoV-2 epitope
FGMSRIGMEVTPSGT

SEQ ID NO: 884 - protein, 15 aa, Artificial Sequence
  Description of Artificial Sequence: Synthetic peptide
  SARS-CoV-2 epitope
FRLFARTRSMWSFNP

SEQ ID NO: 885 - protein, 15 aa, Artificial Sequence
  Description of Artificial Sequence: Synthetic peptide
  SARS-CoV-2 epitope
LNVPLHGTILTRPLL

SEQ ID NO: 886 - protein, 15 aa, Artificial Sequence
  Description of Artificial Sequence: Synthetic peptide
  SARS-CoV-2 epitope
GDSGFAAYSRYRIGN

SEQ ID NO: 887 - protein, 15 aa, Artificial Sequence
  Description of Artificial Sequence: Synthetic peptide
  SARS-CoV-2 epitope
VYSRVKNLNSSRVPD

SEQ ID NO: 888 - protein, 15 aa, Artificial Sequence
  Description of Artificial Sequence: Synthetic peptide
  SARS-CoV-2 epitope
NIDGYFKIYSKHTPI

SEQ ID NO: 889 - protein, 15 aa, Artificial Sequence
  Description of Artificial Sequence: Synthetic peptide
  SARS-CoV-2 epitope
GINITRFQTLLALHR

SEQ ID NO: 890 - protein, 15 aa, Artificial Sequence
  Description of Artificial Sequence: Synthetic peptide
  SARS-CoV-2 epitope
QTLLALHRSYLTPGD

SEQ ID NO: 891 - protein, 15 aa, Artificial Sequence
  Description of Artificial Sequence: Synthetic peptide
  SARS-CoV-2 epitope
EVFNATRFASVYAWN

SEQ ID NO: 892 - protein, 15 aa, Artificial Sequence
  Description of Artificial Sequence: Synthetic peptide
  SARS-CoV-2 epitope
FASVYAWNRKRISNC

SEQ ID NO: 893 - protein, 15 aa, Artificial Sequence
  Description of Artificial Sequence: Synthetic peptide
  SARS-CoV-2 epitope
TESNKKFLPFQQFGR

SEQ ID NO: 894 - protein, 15 aa, Artificial Sequence
  Description of Artificial Sequence: Synthetic peptide
  SARS-CoV-2 epitope
ASQSIIAYTMSLGAE

SEQ ID NO: 895 - protein, 15 aa, Artificial Sequence
  Description of Artificial Sequence: Synthetic peptide
  SARS-CoV-2 epitope
VFAQVKQIYKTPPIK

SEQ ID NO: 896 - protein, 15 aa, Artificial Sequence
  Description of Artificial Sequence: Synthetic peptide
  SARS-CoV-2 epitope
QILPDPSKPSKRSFI

SEQ ID NO: 897 - protein, 15 aa, Artificial Sequence
  Description of Artificial Sequence: Synthetic peptide
  SARS-CoV-2 epitope
IPFAMQMAYRFNGIG

SEQ ID NO: 898 - protein, 15 aa, Artificial Sequence
  Description of Artificial Sequence: Synthetic peptide
  SARS-CoV-2 epitope
LITGRLQSLQTYVTQ

SEQ ID NO: 899 - protein, 15 aa, Artificial Sequence
  Description of Artificial Sequence: Synthetic peptide
  SARS-CoV-2 epitope
QLIRAAEIRASANLA

SEQ ID NO: 900 - protein, 15 aa, Artificial Sequence
  Description of Artificial Sequence: Synthetic peptide
  SARS-CoV-2 epitope
PIHFYSKWYIRVGAR

SEQ ID NO: 901 - protein, 15 aa, Artificial Sequence
  Description of Artificial Sequence: Synthetic peptide
  SARS-CoV-2 epitope
WYIRVGARKSAPLIE

SEQ ID NO: 902 - protein, 15 aa, Artificial Sequence
  Description of Artificial Sequence: Synthetic peptide
  SARS-CoV-2 epitope
KHVYQLRARSVSPKL

SEQ ID NO: 903 - protein, 15 aa, Artificial Sequence
  Description of Artificial Sequence: Synthetic peptide
  SARS-CoV-2 epitope
DFVRATATIPIQASL

SEQ ID NO: 904 - protein, 15 aa, Artificial Sequence
  Description of Artificial Sequence: Synthetic peptide
  SARS-CoV-2 epitope
AVFQSASKIITLKKR

SEQ ID NO: 905 - protein, 15 aa, Artificial Sequence
  Description of Artificial Sequence: Synthetic peptide
  SARS-CoV-2 epitope
KIITLKKRWQLALSK

SEQ ID NO: 906 - protein, 15 aa, Artificial Sequence
  Description of Artificial Sequence: Synthetic peptide
  SARS-CoV-2 epitope
VFIKRSDARTAPHGH

SEQ ID NO: 907 - protein, 15 aa, Artificial Sequence
  Description of Artificial Sequence: Synthetic peptide
  SARS-CoV-2 epitope
VGEIPVAYRKVLLRK

SEQ ID NO: 908 - protein, 15 aa, Artificial Sequence
  Description of Artificial Sequence: Synthetic peptide
  SARS-CoV-2 epitope
YRKVLLRKNGNKGAG

SEQ ID NO: 909 - protein, 15 aa, Artificial Sequence
  Description of Artificial Sequence: Synthetic peptide
  SARS-CoV-2 epitope
LLRKNGNKGAGGHSY

SEQ ID NO: 910 - protein, 15 aa, Artificial Sequence
  Description of Artificial Sequence: Synthetic peptide
  SARS-CoV-2 epitope
QTPFEIKLAKKFDTF

SEQ ID NO: 911 - protein, 15 aa, Artificial Sequence
  Description of Artificial Sequence: Synthetic peptide
  SARS-CoV-2 epitope
NSIIKTIQPRVEKKK

SEQ ID NO: 912 - protein, 15 aa, Artificial Sequence
  Description of Artificial Sequence: Synthetic peptide
  SARS-CoV-2 epitope
KKKLDGFMGRIRSVY

SEQ ID NO: 913 - protein, 15 aa, Artificial Sequence
  Description of Artificial Sequence: Synthetic peptide
  SARS-CoV-2 epitope
SGLKTILRKGGRTIA

SEQ ID NO: 914 - protein, 15 aa, Artificial Sequence
  Description of Artificial Sequence: Synthetic peptide
  SARS-CoV-2 epitope
VETVKGLDYKAFKQI

SEQ ID NO: 915 - protein, 15 aa, Artificial Sequence
  Description of Artificial Sequence: Synthetic peptide
  SARS-CoV-2 epitope
FKVTKGKAKKGAWNI

SEQ ID NO: 916 - protein, 15 aa, Artificial Sequence
  Description of Artificial Sequence: Synthetic peptide
  SARS-CoV-2 epitope
EAARVVRSIFSRTLE

SEQ ID NO: 917 - protein, 15 aa, Artificial Sequence
  Description of Artificial Sequence: Synthetic peptide
  SARS-CoV-2 epitope
AQNSVRVLQKAAITI

SEQ ID NO: 918 - protein, 15 aa, Artificial Sequence
  Description of Artificial Sequence: Synthetic peptide
  SARS-CoV-2 epitope
IIGGAKLKALNLGET

SEQ ID NO: 919 - protein, 15 aa, Artificial Sequence
  Description of Artificial Sequence: Synthetic peptide
  SARS-CoV-2 epitope
VVNAANVYLKHGGGV

SEQ ID NO: 920 - protein, 15 aa, Artificial Sequence
  Description of Artificial Sequence: Synthetic peptide
  SARS-CoV-2 epitope
GALNKATNNAMQVES

SEQ ID NO: 921 - protein, 15 aa, Artificial Sequence
  Description of Artificial Sequence: Synthetic peptide
  SARS-CoV-2 epitope
ETKAIVSTIQRKYKG

SEQ ID NO: 922 - protein, 15 aa, Artificial Sequence
  Description of Artificial Sequence: Synthetic peptide
  SARS-CoV-2 epitope
EAARYMRSLKVPATV

SEQ ID NO: 923 - protein, 15 aa, Artificial Sequence
  Description of Artificial Sequence: Synthetic peptide
  SARS-CoV-2 epitope
LKTLLSLREVRTIKV

SEQ ID NO: 924 - protein, 15 aa, Artificial Sequence
  Description of Artificial Sequence: Synthetic peptide
  SARS-CoV-2 epitope
REVRTIKVFTTVDNI

SEQ ID NO: 925 - protein, 15 aa, Artificial Sequence
  Description of Artificial Sequence: Synthetic peptide
  SARS-CoV-2 epitope
QESPFVMMSAPPAQY

SEQ ID NO: 926 - protein, 15 aa, Artificial Sequence
  Description of Artificial Sequence: Synthetic peptide
  SARS-CoV-2 epitope
LNQLTGYKKPASREL

SEQ ID NO: 927 - protein, 15 aa, Artificial Sequence
  Description of Artificial Sequence: Synthetic peptide
  SARS-CoV-2 epitope
VVAIDYKHYTPSFKK

SEQ ID NO: 928 - protein, 15 aa, Artificial Sequence
  Description of Artificial Sequence: Synthetic peptide
  SARS-CoV-2 epitope
RVLGLKTLATHGLAA

SEQ ID NO: 929 - protein, 15 aa, Artificial Sequence
  Description of Artificial Sequence: Synthetic peptide
  SARS-CoV-2 epitope
TIANYAKPFLNKVVS

SEQ ID NO: 930 - protein, 15 aa, Artificial Sequence
  Description of Artificial Sequence: Synthetic peptide
  SARS-CoV-2 epitope
LINIIIWFLLLSVCL

SEQ ID NO: 931 - protein, 15 aa, Artificial Sequence
  Description of Artificial Sequence: Synthetic peptide
  SARS-CoV-2 epitope
NLVQMAPISAMVRMY

SEQ ID NO: 932 - protein, 15 aa, Artificial Sequence
  Description of Artificial Sequence: Synthetic peptide
  SARS-CoV-2 epitope
STCMMCYKRNRATRV

SEQ ID NO: 933 - protein, 15 aa, Artificial Sequence
  Description of Artificial Sequence: Synthetic peptide
  SARS-CoV-2 epitope
RDLSLQFKRPINPTD

SEQ ID NO: 934 - protein, 15 aa, Artificial Sequence
  Description of Artificial Sequence: Synthetic peptide
  SARS-CoV-2 epitope
LSTFISAARQGFVDS

SEQ ID NO: 935 - protein, 15 aa, Artificial Sequence
  Description of Artificial Sequence: Synthetic peptide
  SARS-CoV-2 epitope
SHQSDIEVTGDSCNN

SEQ ID NO: 936 - protein, 15 aa, Artificial Sequence
  Description of Artificial Sequence: Synthetic peptide
  SARS-CoV-2 epitope
MLTYNKVENMTPRDL

SEQ ID NO: 937 - protein, 15 aa, Artificial Sequence
  Description of Artificial Sequence: Synthetic peptide
  SARS-CoV-2 epitope
ARHINAQVAKSHNIA

SEQ ID NO: 938 - protein, 15 aa, Artificial Sequence
  Description of Artificial Sequence: Synthetic peptide
  SARS-CoV-2 epitope
LSEQLRKQIRSAAKK

SEQ ID NO: 939 - protein, 15 aa, Artificial Sequence
  Description of Artificial Sequence: Synthetic peptide
  SARS-CoV-2 epitope
VTTKIALKGGKIVNN

SEQ ID NO: 940 - protein, 15 aa, Artificial Sequence
  Description of Artificial Sequence: Synthetic peptide
  SARS-CoV-2 epitope
IIGYKAIDGGVTRDI

SEQ ID NO: 941 - protein, 15 aa, Artificial Sequence
  Description of Artificial Sequence: Synthetic peptide
  SARS-CoV-2 epitope
DVLLPLTQYNRYLAL

SEQ ID NO: 942 - protein, 15 aa, Artificial Sequence
  Description of Artificial Sequence: Synthetic peptide
  SARS-CoV-2 epitope
QYNRYLALYNKYKYF

SEQ ID NO: 943 - protein, 15 aa, Artificial Sequence
  Description of Artificial Sequence: Synthetic peptide
  SARS-CoV-2 epitope
YLALYNKYKYFSGAM

SEQ ID NO: 944 - protein, 15 aa, Artificial Sequence
  Description of Artificial Sequence: Synthetic peptide
  SARS-CoV-2 epitope
SAVLQSGFRKMAFPS

SEQ ID NO: 945 - protein, 15 aa, Artificial Sequence
  Description of Artificial Sequence: Synthetic peptide
  SARS-CoV-2 epitope
LLIRKSNHNFLVQAG

SEQ ID NO: 946 - protein, 15 aa, Artificial Sequence
  Description of Artificial Sequence: Synthetic peptide
  SARS-CoV-2 epitope
QAGNVQLRVIGHSMQ

SEQ ID NO: 947 - protein, 15 aa, Artificial Sequence
  Description of Artificial Sequence: Synthetic peptide
  SARS-CoV-2 epitope
GVTFQSAVKRTIKGT

SEQ ID NO: 948 - protein, 15 aa, Artificial Sequence
  Description of Artificial Sequence: Synthetic peptide
  SARS-CoV-2 epitope
MSAFAMMFVKHKHAF

SEQ ID NO: 949 - protein, 15 aa, Artificial Sequence
  Description of Artificial Sequence: Synthetic peptide
  SARS-CoV-2 epitope
EFRYMNSQGLLPPKN

SEQ ID NO: 950 - protein, 15 aa, Artificial Sequence
  Description of Artificial Sequence: Synthetic peptide
  SARS-CoV-2 epitope
LNIKLLGVGGKPCIK

SEQ ID NO: 951 - protein, 15 aa, Artificial Sequence
  Description of Artificial Sequence: Synthetic peptide
  SARS-CoV-2 epitope
EVVLKKLKKSLNVAK

SEQ ID NO: 952 - protein, 15 aa, Artificial Sequence
  Description of Artificial Sequence: Synthetic peptide
  SARS-CoV-2 epitope
ADQAMTQMYKQARSE

SEQ ID NO: 953 - protein, 15 aa, Artificial Sequence
  Description of Artificial Sequence: Synthetic peptide
  SARS-CoV-2 epitope
IVTALRANSAVKLQN

SEQ ID NO: 954 - protein, 15 aa, Artificial Sequence
  Description of Artificial Sequence: Synthetic peptide
  SARS-CoV-2 epitope
ALAYYNTTKGGRFVL

SEQ ID NO: 955 - protein, 15 aa, Artificial Sequence
  Description of Artificial Sequence: Synthetic peptide
  SARS-CoV-2 epitope
YFVVKRHTFSNYQHE

SEQ ID NO: 956 - protein, 15 aa, Artificial Sequence
  Description of Artificial Sequence: Synthetic peptide
  SARS-CoV-2 epitope
GDMVPHISRQRLTKY

SEQ ID NO: 957 - protein, 15 aa, Artificial Sequence
  Description of Artificial Sequence: Synthetic peptide
  SARS-CoV-2 epitope
DILRVYANLGERVRQ

SEQ ID NO: 958 - protein, 15 aa, Artificial Sequence
  Description of Artificial Sequence: Synthetic peptide
  SARS-CoV-2 epitope
ILTLTRALTAESHVD

SEQ ID NO: 959 - protein, 15 aa, Artificial Sequence
  Description of Artificial Sequence: Synthetic peptide
  SARS-CoV-2 epitope
FPFNKWGKARLYYDS

SEQ ID NO: 960 - protein, 15 aa, Artificial Sequence
  Description of Artificial Sequence: Synthetic peptide
  SARS-CoV-2 epitope
DALFAYTKRNVIPTI

SEQ ID NO: 961 - protein, 15 aa, Artificial Sequence
  Description of Artificial Sequence: Synthetic peptide
  SARS-CoV-2 epitope
PTITQMNLKYAISAK

SEQ ID NO: 962 - protein, 15 aa, Artificial Sequence
  Description of Artificial Sequence: Synthetic peptide
  SARS-CoV-2 epitope
LKYAISAKNRARTVA

SEQ ID NO: 963 - protein, 15 aa, Artificial Sequence
  Description of Artificial Sequence: Synthetic peptide
  SARS-CoV-2 epitope
KLLKSIAATRGATVV

SEQ ID NO: 964 - protein, 15 aa, Artificial Sequence
  Description of Artificial Sequence: Synthetic peptide
  SARS-CoV-2 epitope
PNMLRIMASLVLARK

SEQ ID NO: 965 - protein, 15 aa, Artificial Sequence
  Description of Artificial Sequence: Synthetic peptide
  SARS-CoV-2 epitope
SQGLVASIKNFKSVL

SEQ ID NO: 966 - protein, 15 aa, Artificial Sequence
  Description of Artificial Sequence: Synthetic peptide
  SARS-CoV-2 epitope
HTVMPLSAPTLVPQE

SEQ ID NO: 967 - protein, 15 aa, Artificial Sequence
  Description of Artificial Sequence: Synthetic peptide
  SARS-CoV-2 epitope
NVANYQKVGMQKYST

SEQ ID NO: 968 - protein, 15 aa, Artificial Sequence
  Description of Artificial Sequence: Synthetic peptide
  SARS-CoV-2 epitope
FAIGLALYYPSARIV

SEQ ID NO: 969 - protein, 15 aa, Artificial Sequence
  Description of Artificial Sequence: Synthetic peptide
  SARS-CoV-2 epitope
NYDLSVVNARLRAKH

SEQ ID NO: 970 - protein, 15 aa, Artificial Sequence
  Description of Artificial Sequence: Synthetic peptide
  SARS-CoV-2 epitope
ALVYDNKLKAHKDKS

SEQ ID NO: 971 - protein, 15 aa, Artificial Sequence
  Description of Artificial Sequence: Synthetic peptide
  SARS-CoV-2 epitope
CFKMFYKGVITHDVS

SEQ ID NO: 972 - protein, 15 aa, Artificial Sequence
  Description of Artificial Sequence: Synthetic peptide
  SARS-CoV-2 epitope
VVREFLTRNPAWRKA

SEQ ID NO: 973 - protein, 15 aa, Artificial Sequence
  Description of Artificial Sequence: Synthetic peptide
  SARS-CoV-2 epitope
VFISPYNSQNAVASK

SEQ ID NO: 974 - protein, 15 aa, Artificial Sequence
  Description of Artificial Sequence: Synthetic peptide
  SARS-CoV-2 epitope
GIPKDMTYRRLISMM

SEQ ID NO: 975 - protein, 15 aa, Artificial Sequence
  Description of Artificial Sequence: Synthetic peptide
  SARS-CoV-2 epitope
LISMMGFKMNYQVNG

SEQ ID NO: 976 - protein, 15 aa, Artificial Sequence
  Description of Artificial Sequence: Synthetic peptide
  SARS-CoV-2 epitope
DQFKHLIPLMYKGLP

SEQ ID NO: 977 - protein, 15 aa, Artificial Sequence
  Description of Artificial Sequence: Synthetic peptide
  SARS-CoV-2 epitope
FELTSMKYFVKIGPE

SEQ ID NO: 978 - protein, 15 aa, Artificial Sequence
  Description of Artificial Sequence: Synthetic peptide
  SARS-CoV-2 epitope
QHMVVKAALLADKFP

SEQ ID NO: 979 - protein, 15 aa, Artificial Sequence
  Description of Artificial Sequence: Synthetic peptide
  SARS-CoV-2 epitope
VAFELWAKRNIKPVP

SEQ ID NO: 980 - protein, 15 aa, Artificial Sequence
  Description of Artificial Sequence: Synthetic peptide
  SARS-CoV-2 epitope
KRNIKPVPEVKILNN

SEQ ID NO: 981 - protein, 15 aa, Artificial Sequence
  Description of Artificial Sequence: Synthetic peptide
  SARS-CoV-2 epitope
KPVPEVKILNNLGVD

SEQ ID NO: 982 - protein, 15 aa, Artificial Sequence
  Description of Artificial Sequence: Synthetic peptide
  SARS-CoV-2 epitope
NTVIWDYKRDAPAHI

SEQ ID NO: 983 - protein, 15 aa, Artificial Sequence
  Description of Artificial Sequence: Synthetic peptide
  SARS-CoV-2 epitope
TQFNYYKKVDGVVQQ

SEQ ID NO: 984 - protein, 15 aa, Artificial Sequence
  Description of Artificial Sequence: Synthetic peptide
  SARS-CoV-2 epitope
LLIGLAKRFKESPFE

SEQ ID NO: 985 - protein, 15 aa, Artificial Sequence
  Description of Artificial Sequence: Synthetic peptide
  SARS-CoV-2 epitope
PGVAMPNLYKMQRML

SEQ ID NO: 986 - protein, 15 aa, Artificial Sequence
  Description of Artificial Sequence: Synthetic peptide
  SARS-CoV-2 epitope
LNTLTLAVPYNMRVI

SEQ ID NO: 987 - protein, 15 aa, Artificial Sequence
  Description of Artificial Sequence: Synthetic peptide
  SARS-CoV-2 epitope
RVIHFGAGSDKGVAP

SEQ ID NO: 988 - protein, 15 aa, Artificial Sequence
  Description of Artificial Sequence: Synthetic peptide
  SARS-CoV-2 epitope
KFPLKLRGTAVMSLK

SEQ ID NO: 989 - protein, 15 aa, Artificial Sequence
  Description of Artificial Sequence: Synthetic peptide
  SARS-CoV-2 epitope
LSLLSKGRLIIRENN

SEQ ID NO: 990 - protein, 15 aa, Artificial Sequence
  Description of Artificial Sequence: Synthetic peptide
  SARS-CoV-2 epitope
RLIIRENNRVVISSD

SEQ ID NO: 991 - protein, 15 aa, Artificial Sequence
  Description of Artificial Sequence: Synthetic peptide
  SARS-CoV-2 epitope
RENNRVVISSDVLVN

SEQ ID NO: 992 - protein, 15 aa, Artificial Sequence
  Description of Artificial Sequence: Synthetic peptide
  SARS-CoV-2 epitope
SSPDDQIGYYRRATR

SEQ ID NO: 993 - protein, 15 aa, Artificial Sequence
  Description of Artificial Sequence: Synthetic peptide
  SARS-CoV-2 epitope
GYYRRATRRIRGGDG

SEQ ID NO: 994 - protein, 15 aa, Artificial Sequence
  Description of Artificial Sequence: Synthetic peptide
  SARS-CoV-2 epitope
RATRRIRGGDGKMKD

SEQ ID NO: 995 - protein, 15 aa, Artificial Sequence
  Description of Artificial Sequence: Synthetic peptide
  SARS-CoV-2 epitope
LNKHIDAYKTFPPTE

SEQ ID NO: 996 - protein, 15 aa, Artificial Sequence
  Description of Artificial Sequence: Synthetic peptide
  SARS-CoV-2 epitope
SFRLFARTRSMWSFN

SEQ ID NO: 997 - protein, 15 aa, Artificial Sequence
  Description of Artificial Sequence: Synthetic peptide
  SARS-CoV-2 epitope
AVILRGHLRIAGHHL

SEQ ID NO: 998 - protein, 15 aa, Artificial Sequence
  Description of Artificial Sequence: Synthetic peptide
  SARS-CoV-2 epitope
GDSGFAAYSRYRIGN

SEQ ID NO: 999 - protein, 15 aa, Artificial Sequence
  Description of Artificial Sequence: Synthetic peptide
  SARS-CoV-2 epitope
VKPSFYVYSRVKNLN

SEQ ID NO: 1000 - protein, 15 aa, Artificial Sequence
  Description of Artificial Sequence: Synthetic peptide
  SARS-CoV-2 epitope
PDKVFRSSVLHSTQD

SEQ ID NO: 1001 - protein, 15 aa, Artificial Sequence
  Description of Artificial Sequence: Synthetic peptide
  SARS-CoV-2 epitope
INITRFQTLLALHRS

SEQ ID NO: 1002 - protein, 15 aa, Artificial Sequence
  Description of Artificial Sequence: Synthetic peptide
  SARS-CoV-2 epitope
YRLFRKSNLKPFERD

SEQ ID NO: 1003 - protein, 15 aa, Artificial Sequence
  Description of Artificial Sequence: Synthetic peptide
  SARS-CoV-2 epitope
VLTESNKKFLPFQQF

SEQ ID NO: 1004 - protein, 15 aa, Artificial Sequence
  Description of Artificial Sequence: Synthetic peptide
  SARS-CoV-2 epitope
RRARSVASQSIIAYT

SEQ ID NO: 1005 - protein, 15 aa, Artificial Sequence
  Description of Artificial Sequence: Synthetic peptide
  SARS-CoV-2 epitope
IAYTMSLGAENSVAY

SEQ ID NO: 1006 - protein, 15 aa, Artificial Sequence
  Description of Artificial Sequence: Synthetic peptide
  SARS-CoV-2 epitope
TNFTISVTTEILPVS

SEQ ID NO: 1007 - protein, 15 aa, Artificial Sequence
  Description of Artificial Sequence: Synthetic peptide
  SARS-CoV-2 epitope
VFAQVKQIYKTPPIK

SEQ ID NO: 1008 - protein, 15 aa, Artificial Sequence
  Description of Artificial Sequence: Synthetic peptide
  SARS-CoV-2 epitope
FSQILPDPSKPSKRS

SEQ ID NO: 1009 - protein, 15 aa, Artificial Sequence
  Description of Artificial Sequence: Synthetic peptide
  SARS-CoV-2 epitope
IPFAMQMAYRFNGIG

SEQ ID NO: 1010 - protein, 15 aa, Artificial Sequence
  Description of Artificial Sequence: Synthetic peptide
  SARS-CoV-2 epitope
GKIQDSLSSTASALG

SEQ ID NO: 1011 - protein, 15 aa, Artificial Sequence
  Description of Artificial Sequence: Synthetic peptide
  SARS-CoV-2 epitope
ALNTLVKQLSSNFGA

SEQ ID NO: 1012 - protein, 15 aa, Artificial Sequence
  Description of Artificial Sequence: Synthetic peptide
  SARS-CoV-2 epitope
LITGRLQSLQTYVTQ

SEQ ID NO: 1013 - protein, 15 aa, Artificial Sequence
  Description of Artificial Sequence: Synthetic peptide
  SARS-CoV-2 epitope
QLIRAAEIRASANLA

SEQ ID NO: 1014 - protein, 15 aa, Artificial Sequence
  Description of Artificial Sequence: Synthetic peptide
  SARS-CoV-2 epitope
IRASANLAATKMSEC

SEQ ID NO: 1015 - protein, 15 aa, Artificial Sequence
  Description of Artificial Sequence: Synthetic peptide
  SARS-CoV-2 epitope
KWYIRVGARKSAPLI

SEQ ID NO: 1016 - protein, 15 aa, Artificial Sequence
  Description of Artificial Sequence: Synthetic peptide
  SARS-CoV-2 epitope
KHVYQLRARSVSPKL

SEQ ID NO: 1017 - protein, 15 aa, Artificial Sequence
  Description of Artificial Sequence: Synthetic peptide
  SARS-CoV-2 epitope
NLIIKNLSKSLTENK

SEQ ID NO: 1018 - protein, 15 aa, Artificial Sequence
  Description of Artificial Sequence: Synthetic peptide
  SARS-CoV-2 epitope
SDFVRATATIPIQAS

SEQ ID NO: 1019 - protein, 15 aa, Artificial Sequence
  Description of Artificial Sequence: Synthetic peptide
  SARS-CoV-2 epitope
AVFQSASKIITLKKR

SEQ ID NO: 1020 - protein, 15 aa, Artificial Sequence
  Description of Artificial Sequence: Synthetic peptide
  SARS-CoV-2 epitope
KIITLKKRWQLALSK

SEQ ID NO: 1021 - protein, 15 aa, Artificial Sequence
  Description of Artificial Sequence: Synthetic peptide
  SARS-CoV-2 epitope
SLPVLQVRDVLVRGF

SEQ ID NO: 1022 - protein, 15 aa, Artificial Sequence
  Description of Artificial Sequence: Synthetic peptide
  SARS-CoV-2 epitope
LEQPYVFIKRSDART

SEQ ID NO: 1023 - protein, 15 aa, Artificial Sequence
  Description of Artificial Sequence: Synthetic peptide
  SARS-CoV-2 epitope
PVAYRKVLLRKNGNK

SEQ ID NO: 1024 - protein, 15 aa, Artificial Sequence
  Description of Artificial Sequence: Synthetic peptide
  SARS-CoV-2 epitope
PFEIKLAKKFDTFNG

SEQ ID NO: 1025 - protein, 15 aa, Artificial Sequence
  Description of Artificial Sequence: Synthetic peptide
  SARS-CoV-2 epitope
FPLNSIIKTIQPRVE

SEQ ID NO: 1026 - protein, 15 aa, Artificial Sequence
  Description of Artificial Sequence: Synthetic peptide
  SARS-CoV-2 epitope
FMGRIRSVYPVASPN

SEQ ID NO: 1027 - protein, 15 aa, Artificial Sequence
  Description of Artificial Sequence: Synthetic peptide
  SARS-CoV-2 epitope
NESGLKTILRKGGRT

SEQ ID NO: 1028 - protein, 15 aa, Artificial Sequence
  Description of Artificial Sequence: Synthetic peptide
  SARS-CoV-2 epitope
LEILQKEKVNINIVG

SEQ ID NO: 1029 - protein, 15 aa, Artificial Sequence
  Description of Artificial Sequence: Synthetic peptide
  SARS-CoV-2 epitope
LSPLYAFASEAARVV

SEQ ID NO: 1030 - protein, 15 aa, Artificial Sequence
  Description of Artificial Sequence: Synthetic peptide
  SARS-CoV-2 epitope
ARVVRSIFSRTLETA

SEQ ID NO: 1031 - protein, 15 aa, Artificial Sequence
  Description of Artificial Sequence: Synthetic peptide
  SARS-CoV-2 epitope
TAQNSVRVLQKAAIT

SEQ ID NO: 1032 - protein, 15 aa, Artificial Sequence
  Description of Artificial Sequence: Synthetic peptide
  SARS-CoV-2 epitope
RLIDAMMFTSDLATN

SEQ ID NO: 1033 - protein, 15 aa, Artificial Sequence
  Description of Artificial Sequence: Synthetic peptide
  SARS-CoV-2 epitope
ALAPNMMVTNNTFTL

SEQ ID NO: 1034 - protein, 15 aa, Artificial Sequence
  Description of Artificial Sequence: Synthetic peptide
  SARS-CoV-2 epitope
VIKTLQPVSELLTPL

SEQ ID NO: 1035 - protein, 15 aa, Artificial Sequence
  Description of Artificial Sequence: Synthetic peptide
  SARS-CoV-2 epitope
SGYLKLTDNVYIKNA

SEQ ID NO: 1036 - protein, 15 aa, Artificial Sequence
  Description of Artificial Sequence: Synthetic peptide
  SARS-CoV-2 epitope
KPTVVVNAANVYLKH

SEQ ID NO: 1037 - protein, 15 aa, Artificial Sequence
  Description of Artificial Sequence: Synthetic peptide
  SARS-CoV-2 epitope
VAGALNKATNNAMQV

SEQ ID NO: 1038 - protein, 15 aa, Artificial Sequence
  Description of Artificial Sequence: Synthetic peptide
  SARS-CoV-2 epitope
ITESKPSVEQRKQDD

SEQ ID NO: 1039 - protein, 15 aa, Artificial Sequence
  Description of Artificial Sequence: Synthetic peptide
  SARS-CoV-2 epitope
TFLKKDAPYIVGDVV

SEQ ID NO: 1040 - protein, 15 aa, Artificial Sequence
  Description of Artificial Sequence: Synthetic peptide
  SARS-CoV-2 epitope
TAVVIPTKKAGGTTE

SEQ ID NO: 1041 - protein, 15 aa, Artificial Sequence
  Description of Artificial Sequence: Synthetic peptide
  SARS-CoV-2 epitope
ARYMRSLKVPATVSV

SEQ ID NO: 1042 - protein, 15 aa, Artificial Sequence
  Description of Artificial Sequence: Synthetic peptide
  SARS-CoV-2 epitope
KVPATVSVSSPDAVT

SEQ ID NO: 1043 - protein, 15 aa, Artificial Sequence
  Description of Artificial Sequence: Synthetic peptide
  SARS-CoV-2 epitope
LQQIELKFNPPALQD

SEQ ID NO: 1044 - protein, 15 aa, Artificial Sequence
  Description of Artificial Sequence: Synthetic peptide
  SARS-CoV-2 epitope
PSFKKGAKLLHKPIV

SEQ ID NO: 1045 - protein, 15 aa, Artificial Sequence
  Description of Artificial Sequence: Synthetic peptide
  SARS-CoV-2 epitope
KLLHKPIVWHVNNAT

SEQ ID NO: 1046 - protein, 15 aa, Artificial Sequence
  Description of Artificial Sequence: Synthetic peptide
  SARS-CoV-2 epitope
SLTIKKPNELSRVLG

SEQ ID NO: 1047 - protein, 15 aa, Artificial Sequence
  Description of Artificial Sequence: Synthetic peptide
  SARS-CoV-2 epitope
VLGLKTLATHGLAAV

SEQ ID NO: 1048 - protein, 15 aa, Artificial Sequence
  Description of Artificial Sequence: Synthetic peptide
  SARS-CoV-2 epitope
LNKVVSTTTNIVTRC

SEQ ID NO: 1049 - protein, 15 aa, Artificial Sequence
  Description of Artificial Sequence: Synthetic peptide
  SARS-CoV-2 epitope
CTFTRSTNSRIKASM

SEQ ID NO: 1050 - protein, 15 aa, Artificial Sequence
  Description of Artificial Sequence: Synthetic peptide
  SARS-CoV-2 epitope
RIKASMPTTIAKNTV

SEQ ID NO: 1051 - protein, 15 aa, Artificial Sequence
  Description of Artificial Sequence: Synthetic peptide
  SARS-CoV-2 epitope
RDLSLQFKRPINPTD

SEQ ID NO: 1052 - protein, 15 aa, Artificial Sequence
  Description of Artificial Sequence: Synthetic peptide
  SARS-CoV-2 epitope
NAQVAKSHNIALIWN

SEQ ID NO: 1053 - protein, 15 aa, Artificial Sequence
  Description of Artificial Sequence: Synthetic peptide
  SARS-CoV-2 epitope
ATTRQVVNVVTTKIA

SEQ ID NO: 1054 - protein, 15 aa, Artificial Sequence
  Description of Artificial Sequence: Synthetic peptide
  SARS-CoV-2 epitope
KIALKGGKIVNNWLK

SEQ ID NO: 1055 - protein, 15 aa, Artificial Sequence
  Description of Artificial Sequence: Synthetic peptide
  SARS-CoV-2 epitope
CPLIAAVITREVGFV

SEQ ID NO: 1056 - protein, 15 aa, Artificial Sequence
  Description of Artificial Sequence: Synthetic peptide
  SARS-CoV-2 epitope
GTILRTTNGDFLHFL

SEQ ID NO: 1057 - protein, 15 aa, Artificial Sequence
  Description of Artificial Sequence: Synthetic peptide
  SARS-CoV-2 epitope
NYLKRRVVFNGVSFS

SEQ ID NO: 1058 - protein, 15 aa, Artificial Sequence
  Description of Artificial Sequence: Synthetic peptide
  SARS-CoV-2 epitope
DLLIRKSNHNFLVQA

SEQ ID NO: 1059 - protein, 15 aa, Artificial Sequence
  Description of Artificial Sequence: Synthetic peptide
  SARS-CoV-2 epitope
LVQAGNVQLRVIGHS

SEQ ID NO: 1060 - protein, 15 aa, Artificial Sequence
  Description of Artificial Sequence: Synthetic peptide
  SARS-CoV-2 epitope
PKYKFVRIQPGQTFS

SEQ ID NO: 1061 - protein, 15 aa, Artificial Sequence
  Description of Artificial Sequence: Synthetic peptide
  SARS-CoV-2 epitope
IISVTSNYSGVVTTV

SEQ ID NO: 1062 - protein, 15 aa, Artificial Sequence
  Description of Artificial Sequence: Synthetic peptide
  SARS-CoV-2 epitope
SIDAFKLNIKLLGVG

SEQ ID NO: 1063 - protein, 15 aa, Artificial Sequence
  Description of Artificial Sequence: Synthetic peptide
  SARS-CoV-2 epitope
CIKVATVQSKMSDVK

SEQ ID NO: 1064 - protein, 15 aa, Artificial Sequence
  Description of Artificial Sequence: Synthetic peptide
  SARS-CoV-2 epitope
VLKKLKKSLNVAKSE

SEQ ID NO: 1065 - protein, 15 aa, Artificial Sequence
  Description of Artificial Sequence: Synthetic peptide
  SARS-CoV-2 epitope
AMTQMYKQARSEDKR

SEQ ID NO: 1066 - protein, 15 aa, Artificial Sequence
  Description of Artificial Sequence: Synthetic peptide
  SARS-CoV-2 epitope
DKRAKVTSAMQTMLF

SEQ ID NO: 1067 - protein, 15 aa, Artificial Sequence
  Description of Artificial Sequence: Synthetic peptide
  SARS-CoV-2 epitope
FTMLRKLDNDALNNI

SEQ ID NO: 1068 - protein, 15 aa, Artificial Sequence
  Description of Artificial Sequence: Synthetic peptide
  SARS-CoV-2 epitope
IPLTTAAKLMVVIPD

SEQ ID NO: 1069 - protein, 15 aa, Artificial Sequence
  Description of Artificial Sequence: Synthetic peptide
  SARS-CoV-2 epitope
IVTALRANSAVKLQN

SEQ ID NO: 1070 - protein, 15 aa, Artificial Sequence
  Description of Artificial Sequence: Synthetic peptide
  SARS-CoV-2 epitope
YNTTKGGRFVLALLS

SEQ ID NO: 1071 - protein, 15 aa, Artificial Sequence
  Description of Artificial Sequence: Synthetic peptide
  SARS-CoV-2 epitope
FIKGLNNLNRGMVLG

SEQ ID NO: 1072 - protein, 15 aa, Artificial Sequence
  Description of Artificial Sequence: Synthetic peptide
  SARS-CoV-2 epitope
LGSLAATVRLQAGNA

SEQ ID NO: 1073 - protein, 15 aa, Artificial Sequence
  Description of Artificial Sequence: Synthetic peptide
  SARS-CoV-2 epitope
SYFVVKRHTFSNYQH

SEQ ID NO: 1074 - protein, 15 aa, Artificial Sequence
  Description of Artificial Sequence: Synthetic peptide
  SARS-CoV-2 epitope
PILTLTRALTAESHV

SEQ ID NO: 1075 - protein, 15 aa, Artificial Sequence
  Description of Artificial Sequence: Synthetic peptide
  SARS-CoV-2 epitope
PAMHAASGNLLLDKR

SEQ ID NO: 1076 - protein, 15 aa, Artificial Sequence
  Description of Artificial Sequence: Synthetic peptide
  SARS-CoV-2 epitope
ALFAYTKRNVIPTIT

SEQ ID NO: 1077 - protein, 15 aa, Artificial Sequence
  Description of Artificial Sequence: Synthetic peptide
  SARS-CoV-2 epitope
IPTITQMNLKYAISA

SEQ ID NO: 1078 - protein, 15 aa, Artificial Sequence
  Description of Artificial Sequence: Synthetic peptide
  SARS-CoV-2 epitope
NLKYAISAKNRARTV

SEQ ID NO: 1079 - protein, 15 aa, Artificial Sequence
  Description of Artificial Sequence: Synthetic peptide
  SARS-CoV-2 epitope
QKLLKSIAATRGATV

SEQ ID NO: 1080 - protein, 15 aa, Artificial Sequence
  Description of Artificial Sequence: Synthetic peptide
  SARS-CoV-2 epitope
VIGTSKFYGGWHNML

SEQ ID NO: 1081 - protein, 15 aa, Artificial Sequence
  Description of Artificial Sequence: Synthetic peptide
  SARS-CoV-2 epitope
MASLVLARKHTTCCS

SEQ ID NO: 1082 - protein, 15 aa, Artificial Sequence
  Description of Artificial Sequence: Synthetic peptide
  SARS-CoV-2 epitope
LLSTDGNKIADKYVR

SEQ ID NO: 1083 - protein, 15 aa, Artificial Sequence
  Description of Artificial Sequence: Synthetic peptide
  SARS-CoV-2 epitope
ASQGLVASIKNFKSV

SEQ ID NO: 1084 - protein, 15 aa, Artificial Sequence
  Description of Artificial Sequence: Synthetic peptide
  SARS-CoV-2 epitope
VISTSHKLVLSVNPY

SEQ ID NO: 1085 - protein, 15 aa, Artificial Sequence
  Description of Artificial Sequence: Synthetic peptide
  SARS-CoV-2 epitope
LSYGIATVREVLSDR

SEQ ID NO: 1086 - protein, 15 aa, Artificial Sequence
  Description of Artificial Sequence: Synthetic peptide
  SARS-CoV-2 epitope
TSHTVMPLSAPTLVP

SEQ ID NO: 1087 - protein, 15 aa, Artificial Sequence
  Description of Artificial Sequence: Synthetic peptide
  SARS-CoV-2 epitope
VANYQKVGMQKYSTL

SEQ ID NO: 1088 - protein, 15 aa, Artificial Sequence
  Description of Artificial Sequence: Synthetic peptide
  SARS-CoV-2 epitope
IVDTVSALVYDNKLK

SEQ ID NO: 1089 - protein, 15 aa, Artificial Sequence
  Description of Artificial Sequence: Synthetic peptide
  SARS-CoV-2 epitope
HDVSSAINRPQIGVV

SEQ ID NO: 1090 - protein, 15 aa, Artificial Sequence
  Description of Artificial Sequence: Synthetic peptide
  SARS-CoV-2 epitope
ASKILGLPTQTVDSS

SEQ ID NO: 1091 - protein, 15 aa, Artificial Sequence
  Description of Artificial Sequence: Synthetic peptide
  SARS-CoV-2 epitope
RRLISMMGFKMNYQV

SEQ ID NO: 1092 - protein, 15 aa, Artificial Sequence
  Description of Artificial Sequence: Synthetic peptide
  SARS-CoV-2 epitope
PPGDQFKHLIPLMYK

SEQ ID NO: 1093 - protein, 15 aa, Artificial Sequence
  Description of Artificial Sequence: Synthetic peptide
  SARS-CoV-2 epitope
HMVVKAALLADKFPV

SEQ ID NO: 1094 - protein, 15 aa, Artificial Sequence
  Description of Artificial Sequence: Synthetic peptide
  SARS-CoV-2 epitope
VDLFRNARNGVLITE

SEQ ID NO: 1095 - protein, 15 aa, Artificial Sequence
  Description of Artificial Sequence: Synthetic peptide
  SARS-CoV-2 epitope
IGLAKRFKESPFELE

SEQ ID NO: 1096 - protein, 15 aa, Artificial Sequence
  Description of Artificial Sequence: Synthetic peptide
  SARS-CoV-2 epitope
ATLPKGIMMNVAKYT

SEQ ID NO: 1097 - protein, 15 aa, Artificial Sequence
  Description of Artificial Sequence: Synthetic peptide
  SARS-CoV-2 epitope
QWLPTGTLLVDSDLN

SEQ ID NO: 1098 - protein, 15 aa, Artificial Sequence
  Description of Artificial Sequence: Synthetic peptide
  SARS-CoV-2 epitope
LGGSVAIKITEHSWN

SEQ ID NO: 1099 - protein, 15 aa, Artificial Sequence
  Description of Artificial Sequence: Synthetic peptide
  SARS-CoV-2 epitope
PLKLRGTAVMSLKEG

SEQ ID NO: 1100 - protein, 15 aa, Artificial Sequence
  Description of Artificial Sequence: Synthetic peptide
  SARS-CoV-2 epitope
ILSLLSKGRLIIREN

SEQ ID NO: 1101 - protein, 15 aa, Artificial Sequence
  Description of Artificial Sequence: Synthetic peptide
  SARS-CoV-2 epitope
GRLIIRENNRVVISS

SEQ ID NO: 1102 - protein, 15 aa, Artificial Sequence
  Description of Artificial Sequence: Synthetic peptide
  SARS-CoV-2 epitope
DQIGYYRRATRRIRG

SEQ ID NO: 1103 - protein, 15 aa, Artificial Sequence
  Description of Artificial Sequence: Synthetic peptide
  SARS-CoV-2 epitope
IGTRNPANNAAIVLQ

SEQ ID NO: 1104 - protein, 15 aa, Artificial Sequence
  Description of Artificial Sequence: Synthetic peptide
  SARS-CoV-2 epitope
QLESKMSGKGQQQQG

SEQ ID NO: 1105 - protein, 15 aa, Artificial Sequence
  Description of Artificial Sequence: Synthetic peptide
  SARS-CoV-2 epitope
ASAFFGMSRIGMEVT

SEQ ID NO: 1106 - protein, 15 aa, Artificial Sequence
  Description of Artificial Sequence: Synthetic peptide
  SARS-CoV-2 epitope
VILLNKHIDAYKTFP

SEQ ID NO: 1107 - protein, 15 aa, Artificial Sequence
  Description of Artificial Sequence: Synthetic peptide
  SARS-CoV-2 epitope
PQRQKKQQTVTLLPA

SEQ ID NO: 1108 - protein, 15 aa, Artificial Sequence
  Description of Artificial Sequence: Synthetic peptide
  SARS-CoV-2 epitope
IASFRLFARTRSMWS

SEQ ID NO: 1109 - protein, 15 aa, Artificial Sequence
  Description of Artificial Sequence: Synthetic peptide
  SARS-CoV-2 epitope
IGAVILRGHLRIAGH

SEQ ID NO: 1110 - protein, 15 aa, Artificial Sequence
  Description of Artificial Sequence: Synthetic peptide
  SARS-CoV-2 epitope
SFVSEETGTLIVNSV

SEQ ID NO: 1111 - DNA, 822 bp, Homo sapiens
  TCR_1Alpha chain
atgtcactttctagcctgctgaaggtggtcacagcttcactgtggctaggacctggcattgcccagaagataactcaaacccaaccaggaatgttcgtgcaggaaaaggaggctgtgactctggactgcacatatgacaccagtgatccaagttatggtctattctggtacaagcagcccagcagtggggaaatgatttttcttatttatcaggggtcttatgaccagcaaaatgcaacagaaggtcgctactcattgaatttccagaaggcaagaaaatccgccaaccttgtcatctccgcttcacaactgggggactcagcaatgtatttctgtgcaatgtacgaaggaaatgagaaattaacctttgggactggaacaagactcaccatcatacccaatatccagaaccctgaccctgccgtgtaccagctgagagactctaaatccagtgacaagtctgtctgcctattcaccgattttgattctcaaacaaatgtgtcacaaagtaaggattctgatgtgtatatcacagacaaaactgtgctagacatgaggtctatggacttcaagagcaacagtgctgtggcctggagcaacaaatctgactttgcatgtgcaaacgccttcaacaacagcattattccagaagacaccttcttccccagcccagaaagttcctgtgatgtcaagctggtcgagaaaagctttgaaacagatacgaacctaaactttcaaaacctgtcagtgattgggttccgaatcctcctcctgaaagtggccgggtttaatctgctcatgacgctgcggctgtggtccagc

SEQ ID NO: 1112 - DNA, 798 bp, Homo sapiens
  TCR_2Alpha chain
atgaggcaagtggcgagagtgatcgtgttcctgaccctgagtactttgagccttgctaagaccacccagcccatctccatggactcatatgaaggacaagaagtgaacataacctgtagccacaacaacattgctacaaatgattatatcacgtggtaccaacagtttcccagccaaggaccacgatttattattcaaggatacaagacaaaagttacaaacgaagtggcctccctgtttatccctgccgacagaaagtccagcactctgagcctgccccgggtttccctgagcgacactgctgtgtactactgcctcgtgggtaacaatgccagactcatgtttggagatggaactcagctggtggtgaagcccaatatccagaaccctgaccctgccgtgtaccagctgagagactctaaatccagtgacaagtctgtctgcctattcaccgattttgattctcaaacaaatgtgtcacaaagtaaggattctgatgtgtatatcacagacaaaactgtgctagacatgaggtctatggacttcaagagcaacagtgctgtggcctggagcaacaaatctgactttgcatgtgcaaacgccttcaacaacagcattattccagaagacaccttcttccccagcccagaaagttcctgtgatgtcaagctggtcgagaaaagctttgaaacagatacgaacctaaactttcaaaacctgtcagtgattgggttccgaatcctcctcctgaaagtggccgggtttaatctgctcatgacgctgcggctgtggtccagc

SEQ ID NO: 1113 - DNA, 828 bp, Homo sapiens
  TCR_3Alpha chain
atggtgaagatccggcaatttttgttggctattttgtggcttcagctaagctgtgtaagtgccgccaaaaatgaagtggagcagagtcctcagaacctgactgcccaggaaggagaatttatcacaatcaactgcagttactcggtaggaataagtgccttacactggctgcaacagcatccaggaggaggcattgtttccttgtttatgctgagctcagggaagaagaagcatggaagattaattgccacaataaacatacaggaaaagcacagctccctgcacatcacagcctcccatcccagagactctgccgtctacatctgtgctgtcagatcgcatggtagtggaggtagcaactataaactgacatttggaaaaggaactctcttaaccgtgaatccaaatatccagaaccctgaccctgccgtgtaccagctgagagactctaaatccagtgacaagtctgtctgcctattcaccgattttgattctcaaacaaatgtgtcacaaagtaaggattctgatgtgtatatcacagacaaaactgtgctagacatgaggtctatggacttcaagagcaacagtgctgtggcctggagcaacaaatctgactttgcatgtgcaaacgccttcaacaacagcattattccagaagacaccttcttccccagcccagaaagttcctgtgatgtcaagctggtcgagaaaagctttgaaacagatacgaacctaaactttcaaaacctgtcagtgattgggttccgaatcctcctcctgaaagtggccgggtttaatctgctcatgacgctgcggctgtggtccagc

SEQ ID NO: 1114 - DNA, 807 bp, Homo sapiens
  TCR_4Alpha chain
atgaagaagctactagcaatgattctgtggcttcaactagaccggttaagtggagagctgaaagtggaacaaaaccctctgttcctgagcatgcaggagggaaaaaactataccatctactgcaattattcaaccacttcagacagactgtattggtacaggcaggatcctgggaaaagtctggaatctctgtttgtgttgctatcaaatggagcagtgaagcaggagggacgattaatggcctcacttgataccaaagcccgtctcagcaccctccacatcacagctgccgtgcatgacctctctgccacctacttctgtgccgtggttacaccccctgccagactcatgtttggagatggaactcagctggtggtgaagcccaatatccagaaccctgaccctgccgtgtaccagctgagagactctaaatccagtgacaagtctgtctgcctattcaccgattttgattctcaaacaaatgtgtcacaaagtaaggattctgatgtgtatatcacagacaaaactgtgctagacatgaggtctatggacttcaagagcaacagtgctgtggcctggagcaacaaatctgactttgcatgtgcaaacgccttcaacaacagcattattccagaagacaccttcttccccagcccagaaagttcctgtgatgtcaagctggtcgagaaaagctttgaaacagatacgaacctaaactttcaaaacctgtcagtgattgggttccgaatcctcctcctgaaagtggccgggtttaatctgctcatgacgctgcggctgtggtccagc

SEQ ID NO: 1115 - DNA, 810 bp, Homo sapiens
  TCR_5Alpha chain
atgatatccttgagagttttactggtgatcctgtggcttcagttaagctgggtttggagccaacggaaggaggtggagcaggatcctggacccttcaatgttccagagggagccactgtcgctttcaactgtacttacagcaacagtgcttctcagtctttcttctggtacagacaggattgcaggaaagaacctaagttgctgatgtccgtatactccagtggtaatgaagatggaaggtttacagcacagctcaatagagccagccagtatatttccctgctcatcagagactccaagctcagtgattcagccacctacctctgtgtggtgaacgagggtgacaagatcatctttggaaaagggacacgacttcatattctccccaatatccagaaccctgaccctgccgtgtaccagctgagagactctaaatccagtgacaagtctgtctgcctattcaccgattttgattctcaaacaaatgtgtcacaaagtaaggattctgatgtgtatatcacagacaaaactgtgctagacatgaggtctatggacttcaagagcaacagtgctgtggcctggagcaacaaatctgactttgcatgtgcaaacgccttcaacaacagcattattccagaagacaccttcttccccagcccagaaagttcctgtgatgtcaagctggtcgagaaaagctttgaaacagatacgaacctaaactttcaaaacctgtcagtgattgggttccgaatcctcctcctgaaagtggccgggtttaatctgctcatgacgctgcggctgtggtccagc

SEQ ID NO: 1116 - DNA, 837 bp, Homo sapiens
  TCR_6Alpha chain
atgtcactttctagcctgctgaaggtggtcacagcttcactgtggctaggacctggcattgcccagaagataactcaaacccaaccaggaatgttcgtgcaggaaaaggaggctgtgactctggactgcacatatgacaccagtgatcaaagttatggtctattctggtacaagcagcccagcagtggggaaatgatttttcttatttatcaggggtcttatgacgagcaaaatgcaacagaaggtcgctactcattgaatttccagaaggcaagaaaatccgccaaccttgtcatctccgcttcacaactgggggactcagcaatgtatttctgtgcaatgagagaggcctcggcatcaggaggaagctacatacctacatttggaagaggaaccagccttattgttcatccgtatatccagaaccctgaccctgccgtgtaccagctgagagactctaaatccagtgacaagtctgtctgcctattcaccgattttgattctcaaacaaatgtgtcacaaagtaaggattctgatgtgtatatcacagacaaaactgtgctagacatgaggtctatggacttcaagagcaacagtgctgtggcctggagcaacaaatctgactttgcatgtgcaaacgccttcaacaacagcattattccagaagacaccttcttccccagcccagaaagttcctgtgatgtcaagctggtcgagaaaagctttgaaacagatacgaacctaaactttcaaaacctgtcagtgattgggttccgaatcctcctcctgaaagtggccgggtttaatctgctcatgacgctgcggctgtggtccagc

SEQ ID NO: 1117 - DNA, 822 bp, Homo sapiens
  TCR_7Alpha chain
atggcatgccctggcttcctgtgggcacttgtgatctccacctgtcttgaatttagcatggctcagacagtcactcagtctcaaccagagatgtctgtgcaggaggcagagaccgtgaccctgagctgcacatatgacaccagtgagagtgattattatttattctggtacaagcagcctcccagcaggcagatgattctcgttattcgccaagaagcttataagcaacagaatgcaacagagaatcgtttctctgtgaacttccagaaagcagccaaatccttcagtctcaagatctcagactcacagctgggggatgccgcgatgtatttctgtgctgctgtgaataacaatgccagactcatgtttggagatggaactcagctggtggtgaagcccaatatccagaaccctgaccctgccgtgtaccagctgagagactctaaatccagtgacaagtctgtctgcctattcaccgattttgattctcaaacaaatgtgtcacaaagtaaggattctgatgtgtatatcacagacaaaactgtgctagacatgaggtctatggacttcaagagcaacagtgctgtggcctggagcaacaaatctgactttgcatgtgcaaacgccttcaacaacagcattattccagaagacaccttcttccccagcccagaaagttcctgtgatgtcaagctggtcgagaaaagctttgaaacagatacgaacctaaactttcaaaacctgtcagtgattgggttccgaatcctcctcctgaaagtggccgggtttaatctgctcatgacgctgcggctgtggtccagc

SEQ ID NO: 1118 - DNA, 810 bp, Homo sapiens
  TCR_8Alpha chain
atgatatccttgagagttttactggtgatcctgtggcttcagttaagctgggtttggagccaacggaaggaggtggagcaggatcctggacccttcaatgttccagagggagccactgtcgctttcaactgtacttacagcaacagtgcttctcagtctttcttctggtacagacaggattgcaggaaagaacctaagttgctgatgtccgtatactccagtggtaatgaagatggaaggtttacagcacagctcaatagagccagccagtatatttccctgctcatcagagactccaagctcagtgattcagccacctacctctgtgtggtgaacagtggaaacaaactggtctttggcgcaggaaccattctgagagtcaagtcctatatccagaaccctgaccctgccgtgtaccagctgagagactctaaatccagtgacaagtctgtctgcctattcaccgattttgattctcaaacaaatgtgtcacaaagtaaggattctgatgtgtatatcacagacaaaactgtgctagacatgaggtctatggacttcaagagcaacagtgctgtggcctggagcaacaaatctgactttgcatgtgcaaacgccttcaacaacagcattattccagaagacaccttcttccccagcccagaaagttcctgtgatgtcaagctggtcgagaaaagctttgaaacagatacgaacctaaactttcaaaacctgtcagtgattgggttccgaatcctcctcctgaaagtggccgggtttaatctgctcatgacgctgcggctgtggtccagc

SEQ ID NO: 1119 - DNA, 804 bp, Homo sapiens
  TCR_9Alpha chain
atgctactcatcacatcaatgttggtcttatggatgcaattgtcacaggtgaatggacaacaggtaatgcaaattcctcagtaccagcatgtacaagaaggagaggacttcaccacgtactgcaattcctcaactactttaagcaatatacagtggtataagcaaaggcctggtggacatcccgtttttttgatacagttagtgaagagtggagaagtgaagaagcagaaaagactgacatttcagtttggagaagcaaaaaagaacagctccctgcacatcacagccacccagactacagatgtaggaacctacttctgtgcagggcggacttttgacaagatcatctttggaaaagggacacgacttcatattctccccaatatccagaaccctgaccctgccgtgtaccagctgagagactctaaatccagtgacaagtctgtctgcctattcaccgattttgattctcaaacaaatgtgtcacaaagtaaggattctgatgtgtatatcacagacaaaactgtgctagacatgaggtctatggacttcaagagcaacagtgctgtggcctggagcaacaaatctgactttgcatgtgcaaacgccttcaacaacagcattattccagaagacaccttcttccccagcccagaaagttcctgtgatgtcaagctggtcgagaaaagctttgaaacagatacgaacctaaactttcaaaacctgtcagtgattgggttccgaatcctcctcctgaaagtggccgggtttaatctgctcatgacgctgcggctgtggtccagc

SEQ ID NO: 1120 - DNA, 822 bp, Homo sapiens
  TCR_10Alpha chain
atgatatccttgagagttttactggtgatcctgtggcttcagttaagctgggtttggagccaacggaaggaggtggagcaggatcctggacccttcaatgttccagagggagccactgtcgctttcaactgtacttacagcaacagtgcttctcagtctttcttctggtacagacaggattgcaggaaagaacctaagttgctgatgtccgtatactccagtggtaatgaagatggaaggtttacagcacagctcaatagagccagccagtatatttccctgctcatcagagactccaagctcagtgattcagccacctacctctgtgtggtgaccccccggggctcaaccctggggaggctatactttggaagaggaactcagttgactgtctggcctgatatccagaaccctgaccctgccgtgtaccagctgagagactctaaatccagtgacaagtctgtctgcctattcaccgattttgattctcaaacaaatgtgtcacaaagtaaggattctgatgtgtatatcacagacaaaactgtgctagacatgaggtctatggacttcaagagcaacagtgctgtggcctggagcaacaaatctgactttgcatgtgcaaacgccttcaacaacagcattattccagaagacaccttcttccccagcccagaaagttcctgtgatgtcaagctggtcgagaaaagctttgaaacagatacgaacctaaactttcaaaacctgtcagtgattgggttccgaatcctcctcctgaaagtggccgggtttaatctgctcatgacgctgcggctgtggtccagc

SEQ ID NO: 1121 - DNA, 831 bp, Homo sapiens
  TCR_11Alpha chain
atggagaaaatgttggagtgtgcattcatagtcttgtggcttcagcttggctggttgagtggagaagaccaggtgacgcagagtcccgaggccctgagactccaggagggagagagtagcagtctcaactgcagttacacagtcagcggtttaagagggctgttctggtataggcaagatcctgggaaaggccctgaattcctcttcaccctgtattcagctggggaagaaaaggagaaagaaaggctaaaagccacattaacaaagaaggaaagctttctgcacatcacagcccctaaacctgaagactcagccacttatctctgtgctgtgcaggcgcccatgagtgcaaggggaagccaaggaaatctcatctttggaaaaggcactaaactctctgttaaaccaaatatccagaaccctgaccctgccgtgtaccagctgagagactctaaatccagtgacaagtctgtctgcctattcaccgattttgattctcaaacaaatgtgtcacaaagtaaggattctgatgtgtatatcacagacaaaactgtgctagacatgaggtctatggacttcaagagcaacagtgctgtggcctggagcaacaaatctgactttgcatgtgcaaacgccttcaacaacagcattattccagaagacaccttcttccccagcccagaaagttcctgtgatgtcaagctggtcgagaaaagctttgaaacagatacgaacctaaactttcaaaacctgtcagtgattgggttccgaatcctcctcctgaaagtggccgggtttaatctgctcatgacgctgcggctgtggtccagc

SEQ ID NO: 1122 - DNA, 807 bp, Homo sapiens
  TCR_12Alpha chain
atgaaatccttgagagttttactagtgatcctgtggcttcagttgagctgggtttggagccaacagaaggaggtggagcagaattctggacccctcagtgttccagagggagccattgcctctctcaactgcacttacagtgaccgaggttcccagtccttcttctggtacagacaatattctgggaaaagccctgagttgataatgttcatatactccaatggtgacaaagaagatggaaggtttacagcacagctcaataaagccagccagtatgtttctctgctcatcagagactcccagcccagtgattcagccacctacctctgtgccgtgaagactgacatgcgctttggagcagggaccagactgacagtaaaaccaaatatccagaaccctgaccctgccgtgtaccagctgagagactctaaatccagtgacaagtctgtctgcctattcaccgattttgattctcaaacaaatgtgtcacaaagtaaggattctgatgtgtatatcacagacaaaactgtgctagacatgaggtctatggacttcaagagcaacagtgctgtggcctggagcaacaaatctgactttgcatgtgcaaacgccttcaacaacagcattattccagaagacaccttcttccccagcccagaaagttcctgtgatgtcaagctggtcgagaaaagctttgaaacagatacgaacctaaactttcaaaacctgtcagtgattgggttccgaatcctcctcctgaaagtggccgggtttaatctgctcatgacgctgcggctgtggtccagc

SEQ ID NO: 1123 - DNA, 819 bp, Homo sapiens
  TCR_13Alpha chain
atggcctctgcacccatctcgatgcttgcgatgctcttcacattgagtgggctgagagctcagtcagtggctcagccggaagatcaggtcaacgttgctgaagggaatcctctgactgtgaaatgcacctattcagtctctggaaacccttatcttttttggtatgttcaataccccaaccgaggcctccagttccttctgaaatacatcacaggggataacctggttaaaggcagctatggctttgaagctgaatttaacaagagccaaacctccttccacctgaagaaaccatctgcccttgtgagcgactccgctttgtacttctgtgctggcctgggcacgggcaggagagcacttacttttgggagtggaacaagactccaagtgcaaccaaatatccagaaccctgaccctgccgtgtaccagctgagagactctaaatccagtgacaagtctgtctgcctattcaccgattttgattctcaaacaaatgtgtcacaaagtaaggattctgatgtgtatatcacagacaaaactgtgctagacatgaggtctatggacttcaagagcaacagtgctgtggcctggagcaacaaatctgactttgcatgtgcaaacgccttcaacaacagcattattccagaagacaccttcttccccagcccagaaagttcctgtgatgtcaagctggtcgagaaaagctttgaaacagatacgaacctaaactttcaaaacctgtcagtgattgggttccgaatcctcctcctgaaagtggccgggtttaatctgctcatgacgctgcggctgtggtccagc

SEQ ID NO: 1124 - DNA, 813 bp, Homo sapiens
  TCR_14Alpha chain
atgatatccttgagagttttactggtgatcctgtggcttcagttaagctgggtttggagccaacggaaggaggtggagcaggatcctggacccttcaatgttccagagggagccactgtcgctttcaactgtacttacagcaacagtgcttctcagtctttcttctggtacagacaggattgcaggaaagaacctaagttgctgatgtccgtatactccagtggtaatgaagatggaaggtttacagcacagctcaatagagccagccagtatatttccctgctcatcagagactccaagctcagtgattcagccacctacctctgtgtggtgacccgaagccaaggaaatctcatctttggaaaaggcactaaactctctgttaaaccaaatatccagaaccctgaccctgccgtgtaccagctgagagactctaaatccagtgacaagtctgtctgcctattcaccgattttgattctcaaacaaatgtgtcacaaagtaaggattctgatgtgtatatcacagacaaaactgtgctagacatgaggtctatggacttcaagagcaacagtgctgtggcctggagcaacaaatctgactttgcatgtgcaaacgccttcaacaacagcattattccagaagacaccttcttccccagcccagaaagttcctgtgatgtcaagctggtcgagaaaagctttgaaacagatacgaacctaaactttcaaaacctgtcagtgattgggttccgaatcctcctcctgaaagtggccgggtttaatctgctcatgacgctgcggctgtggtccagc

SEQ ID NO: 1125 - DNA, 819 bp, Homo sapiens
  TCR_15Alpha chain
atgatatccttgagagttttactggtgatcctgtggcttcagttaagctgggtttggagccaacggaaggaggtggagcaggatcctggacccttcaatgttccagagggagccactgtcgctttcaactgtacttacagcaacagtgcttctcagtctttcttctggtacagacaggattgcaggaaagaacctaagttgctgatgtccgtatactccagtggtaatgaagatggaaggtttacagcacagctcaatagagccagccagtatatttccctgctcatcagagactccaagctcagtgattcagccacctacctctgtgtggtgaacgccccgtcaggaaacacacctcttgtctttggaaagggcacaagactttctgtgattgcaaatatccagaaccctgaccctgccgtgtaccagctgagagactctaaatccagtgacaagtctgtctgcctattcaccgattttgattctcaaacaaatgtgtcacaaagtaaggattctgatgtgtatatcacagacaaaactgtgctagacatgaggtctatggacttcaagagcaacagtgctgtggcctggagcaacaaatctgactttgcatgtgcaaacgccttcaacaacagcattattccagaagacaccttcttccccagcccagaaagttcctgtgatgtcaagctggtcgagaaaagctttgaaacagatacgaacctaaactttcaaaacctgtcagtgattgggttccgaatcctcctcctgaaagtggccgggtttaatctgctcatgacgctgcggctgtggtccagc

SEQ ID NO: 1126 - DNA, 810 bp, Homo sapiens
  TCR_16Alpha chain
atgatatccttgagagttttactggtgatcctgtggcttcagttaagctgggtttggagccaacggaaggaggtggagcaggatcctggacccttcaatgttccagagggagccactgtcgctttcaactgtacttacagcaacagtgcttctcagtctttcttctggtacagacaggattgcaggaaagaacctaagttgctgatgtccgtatactccagtggtaatgaagatggaaggtttacagcacagctcaatagagccagccagtatatttccctgctcatcagagactccaagctcagtgattcagccacctacctctgtgtggtgaacaaggaagacagactcatgtttggagatggaactcagctggtggtgaagcccaatatccagaaccctgaccctgccgtgtaccagctgagagactctaaatccagtgacaagtctgtctgcctattcaccgattttgattctcaaacaaatgtgtcacaaagtaaggattctgatgtgtatatcacagacaaaactgtgctagacatgaggtctatggacttcaagagcaacagtgctgtggcctggagcaacaaatctgactttgcatgtgcaaacgccttcaacaacagcattattccagaagacaccttcttccccagcccagaaagttcctgtgatgtcaagctggtcgagaaaagctttgaaacagatacgaacctaaactttcaaaacctgtcagtgattgggttccgaatcctcctcctgaaagtggccgggtttaatctgctcatgacgctgcggctgtggtccagc

SEQ ID NO: 1127 - DNA, 840 bp, Homo sapiens
  TCR_17Alpha chain
atgtcactttctagcctgctgaaggtggtcacagcttcactgtggctaggacctggcattgcccagaagataactcaaacccaaccaggaatgttcgtgcaggaaaaggaggctgtgactctggactgcacatatgacaccagtgatccaagttatggtctattctggtacaagcagcccagcagtggggaaatgatttttcttatttatcaggggtcttatgaccagcaaaatgcaacagaaggtcgctactcattgaatttccagaaggcaagaaaatccgccaaccttgtcatctccgcttcacaactgggggactcagcaatgtacttctgtgcaatgagagagggcccggctgaaggtggagccaatagtaagctgacatttggaaaaggaataactctgagtgttagaccagatatccagaaccctgaccctgccgtgtaccagctgagagactctaaatccagtgacaagtctgtctgcctattcaccgattttgattctcaaacaaatgtgtcacaaagtaaggattctgatgtgtatatcacagacaaaactgtgctagacatgaggtctatggacttcaagagcaacagtgctgtggcctggagcaacaaatctgactttgcatgtgcaaacgccttcaacaacagcattattccagaagacaccttcttccccagcccagaaagttcctgtgatgtcaagctggtcgagaaaagctttgaaacagatacgaacctaaactttcaaaacctgtcagtgattgggttccgaatcctcctcctgaaagtggccgggtttaatctgctcatgacgctgcggctgtggtccagc

SEQ ID NO: 1128 - DNA, 810 bp, Homo sapiens
  TCR_18Alpha chain
atggagaccctcttgggcctgcttatcctttggctgcagctgcaatgggtgagcagcaaacaggaggtgacgcagattcctgcagctctgagtgtcccagaaggagaaaacttggttctcaactgcagtttcactgatagcgctatttacaacctccagtggtttaggcaggaccctgggaaaggtctcacatctctgttgcttattcagtcaagtcagagagagcaaacaagtggaagacttaatgcctcgctggataaatcatcaggacgtagtactttatacattgcagcttctcagcctggtgactcagccacctacctctgtgctgtgaggcagaatgacaagatcatctttggaaaagggacacgacttcatattctccccaatatccagaaccctgaccctgccgtgtaccagctgagagactctaaatccagtgacaagtctgtctgcctattcaccgattttgattctcaaacaaatgtgtcacaaagtaaggattctgatgtgtatatcacagacaaaactgtgctagacatgaggtctatggacttcaagagcaacagtgctgtggcctggagcaacaaatctgactttgcatgtgcaaacgccttcaacaacagcattattccagaagacaccttcttccccagcccagaaagttcctgtgatgtcaagctggtcgagaaaagctttgaaacagatacgaacctaaactttcaaaacctgtcagtgattgggttccgaatcctcctcctgaaagtggccgggtttaatctgctcatgacgctgcggctgtggtccagc

SEQ ID NO: 1129 - DNA, 813 bp, Homo sapiens
  TCR_19Alpha chain
atgatatccttgagagttttactggtgatcctgtggcttcagttaagctgggtttggagccaacggaaggaggtggagcaggatcctggacccttcaatgttccagagggagccactgtcgctttcaactgtacttacagcaacagtgcttctcagtctttcttctggtacagacaggattgcaggaaagaacctaagttgctgatgtccgtatactccagtggtaatgaagatggaaggtttacagcacagctcaatagagccagccagtatatttccctgctcatcagagactccaagctcagtgattcagccacctacctctgtgtggtgaacatggccaccgacaagctcatctttgggactgggaccagattacaagtctttccaaatatccagaaccctgaccctgccgtgtaccagctgagagactctaaatccagtgacaagtctgtctgcctattcaccgattttgattctcaaacaaatgtgtcacaaagtaaggattctgatgtgtatatcacagacaaaactgtgctagacatgaggtctatggacttcaagagcaacagtgctgtggcctggagcaacaaatctgactttgcatgtgcaaacgccttcaacaacagcattattccagaagacaccttcttccccagcccagaaagttcctgtgatgtcaagctggtcgagaaaagctttgaaacagatacgaacctaaactttcaaaacctgtcagtgattgggttccgaatcctcctcctgaaagtggccgggtttaatctgctcatgacgctgcggctgtggtccagc

SEQ ID NO: 1130 - DNA, 819 bp, Homo sapiens
  TCR_20Alpha chain
atgatatccttgagagttttactggtgatcctgtggcttcagttaagctgggtttggagccaacggaaggaggtggagcaggatcctggacccttcaatgttccagagggagccactgtcgctttcaactgtacttacagcaacagtgcttctcagtctttcttctggtacagacaggattgcaggaaagaacctaagttgctgatgtccgtatactccagtggtaatgaagatggaaggtttacagcacagctcaatagagccagccagtatatttccctgctcatcagagactccaagctcagtgattcagccacctacctctgtgtggtgaacccgaccggcactgccagtaaactcacctttgggactggaacaagacttcaggtcacgctcgatatccagaaccctgaccctgccgtgtaccagctgagagactctaaatccagtgacaagtctgtctgcctattcaccgattttgattctcaaacaaatgtgtcacaaagtaaggattctgatgtgtatatcacagacaaaactgtgctagacatgaggtctatggacttcaagagcaacagtgctgtggcctggagcaacaaatctgactttgcatgtgcaaacgccttcaacaacagcattattccagaagacaccttcttccccagcccagaaagttcctgtgatgtcaagctggtcgagaaaagctttgaaacagatacgaacctaaactttcaaaacctgtcagtgattgggttccgaatcctcctcctgaaagtggccgggtttaatctgctcatgacgctgcggctgtggtccagc

SEQ ID NO: 1131 - DNA, 810 bp, Homo sapiens
  TCR_21Alpha chain
atggtcctgaaattctccgtgtccattctttggattcagttggcatgggtgagcacccagctgctggagcagagccctcagtttctaagcatccaagagggagaaaatctcactgtgtactgcaactcctcaagtgttttttccagcttacaatggtacagacaggagcctggggaaggtcctgtcctcctggtgacagtagttacgggtggagaagtgaagaagctgaagagactaacctttcagtttggtgatgcaagaaaggacagttctctccacatcactgcagcccagcctggtgatacaggcctctacctctgtgcaggaggaccctcgaggaacaatgacatgcgctttggagcagggaccagactgacagtaaaaccaaatatccagaaccctgaccctgccgtgtaccagctgagagactctaaatccagtgacaagtctgtctgcctattcaccgattttgattctcaaacaaatgtgtcacaaagtaaggattctgatgtgtatatcacagacaaaactgtgctagacatgaggtctatggacttcaagagcaacagtgctgtggcctggagcaacaaatctgactttgcatgtgcaaacgccttcaacaacagcattattccagaagacaccttcttccccagcccagaaagttcctgtgatgtcaagctggtcgagaaaagctttgaaacagatacgaacctaaactttcaaaacctgtcagtgattgggttccgaatcctcctcctgaaagtggccgggtttaatctgctcatgacgctgcggctgtggtccagc

SEQ ID NO: 1132 - DNA, 819 bp, Homo sapiens
  TCR_22Alpha chain
atgctcctgttgctcataccagtgctggggatgatttttgccctgagagatgccagagcccagtctgtgagccagcataaccaccacgtaattctctctgaagcagcctcactggagttgggatgcaactattcctatggtggaactgttaatctcttctggtatgtccagtaccctggtcaacaccttcagcttctcctcaagtacttttcaggggatccactggttaaaggcatcaagggctttgaggctgaatttataaagagtaaattctcctttaatctgaggaaaccctctgtgcagtggagtgacacagctgagtacttctgtgccgtgatagttgcaggaaacacacctcttgtctttggaaagggcacaagactttctgtgattgcaaatatccagaaccctgaccctgccgtgtaccagctgagagactctaaatccagtgacaagtctgtctgcctattcaccgattttgattctcaaacaaatgtgtcacaaagtaaggattctgatgtgtatatcacagacaaaactgtgctagacatgaggtctatggacttcaagagcaacagtgctgtggcctggagcaacaaatctgactttgcatgtgcaaacgccttcaacaacagcattattccagaagacaccttcttccccagcccagaaagttcctgtgatgtcaagctggtcgagaaaagctttgaaacagatacgaacctaaactttcaaaacctgtcagtgattgggttccgaatcctcctcctgaaagtggccgggtttaatctgctcatgacgctgcggctgtggtccagc

SEQ ID NO: 1133 - DNA, 819 bp, Homo sapiens
  TCR_23Alpha chain
atgctcctgctgctcgtcccagtgctcgaggtgatttttactctgggaggaaccagagcccagtcggtgacccagcttgacagccacgtctctgtctctgaaggaaccccggtgctgctgaggtgcaactactcatcttcttattcaccatctctcttctggtatgtgcaacaccccaacaaaggactccagcttctcctgaagtacacatcagcggccaccctggttaaaggcatcaacggttttgaggctgaatttaagaagagtgaaacctccttccacctgacgaaaccctcagcccatatgagcgacgcggctgagtacttctgtgttgtgaccggggctgggagttaccaactcactttcgggaaggggaccaaactctcggtcataccaaatatccagaaccctgaccctgccgtgtaccagctgagagactctaaatccagtgacaagtctgtctgcctattcaccgattttgattctcaaacaaatgtgtcacaaagtaaggattctgatgtgtatatcacagacaaaactgtgctagacatgaggtctatggacttcaagagcaacagtgctgtggcctggagcaacaaatctgactttgcatgtgcaaacgccttcaacaacagcattattccagaagacaccttcttccccagcccagaaagttcctgtgatgtcaagctggtcgagaaaagctttgaaacagatacgaacctaaactttcaaaacctgtcagtgattgggttccgaatcctcctcctgaaagtggccgggtttaatctgctcatgacgctgcggctgtggtccagc

SEQ ID NO: 1134 - DNA, 816 bp, Homo sapiens
  TCR_24Alpha chain
atgctcctggagcttatcccactgctggggatacattttgtcctgagaactgccagagcccagtcagtgacccagcctgacatccacatcactgtctctgaaggagcctcactggagttgagatgtaactattcctatggggcaacaccttatctcttctggtatgtccagtcccccggccaaggcctccagctgctcctgaagtacttttcaggagacactctggttcaaggcattaaaggctttgaggctgaatttaagaggagtcaatcttccttcaatctgaggaaaccctctgtgcattggagtgatgctgctgagtacttctgtgctgtgggtgatgggaacaacagactcgcttttgggaaggggaaccaagtggtggtcataccaaatatccagaaccctgaccctgccgtgtaccagctgagagactctaaatccagtgacaagtctgtctgcctattcaccgattttgattctcaaacaaatgtgtcacaaagtaaggattctgatgtgtatatcacagacaaaactgtgctagacatgaggtctatggacttcaagagcaacagtgctgtggcctggagcaacaaatctgactttgcatgtgcaaacgccttcaacaacagcattattccagaagacaccttcttccccagcccagaaagttcctgtgatgtcaagctggtcgagaaaagctttgaaacagatacgaacctaaactttcaaaacctgtcagtgattgggttccgaatcctcctcctgaaagtggccgggtttaatctgctcatgacgctgcggctgtggtccagc

SEQ ID NO: 1135 - DNA, 810 bp, Homo sapiens
  TCR_25Alpha chain
atgatatccttgagagttttactggtgatcctgtggcttcagttaagctgggtttggagccaacggaaggaggtggagcaggatcctggacccttcaatgttccagagggagccactgtcgctttcaactgtacttacagcaacagtgcttctcagtctttcttctggtacagacaggattgcaggaaagaacctaagttgctgatgtccgtatactccagtggtaatgaagatggaaggtttacagcacagctcaatagagccagccagtatatttccctgctcatcagagactccaagctcagtgattcagccacctacctctgtgtggtgaacaaggaggacagactcatgtttggagatggaactcagctggtggtgaagcccaatatccagaaccctgaccctgccgtgtaccagctgagagactctaaatccagtgacaagtctgtctgcctattcaccgattttgattctcaaacaaatgtgtcacaaagtaaggattctgatgtgtatatcacagacaaaactgtgctagacatgaggtctatggacttcaagagcaacagtgctgtggcctggagcaacaaatctgactttgcatgtgcaaacgccttcaacaacagcattattccagaagacaccttcttccccagcccagaaagttcctgtgatgtcaagctggtcgagaaaagctttgaaacagatacgaacctaaactttcaaaacctgtcagtgattgggttccgaatcctcctcctgaaagtggccgggtttaatctgctcatgacgctgcggctgtggtccagc

SEQ ID NO: 1136 - DNA, 840 bp, Homo sapiens
  TCR_26Alpha chain
atggccatgctcctgggggcatcagtgctgattctgtggcttcagccagactgggtaaacagtcaacagaagaatgatgaccagcaagttaagcaaaattcaccatccctgagcgtccaggaaggaagaatttctattctgaactgtgactatactaacagcatgtttgattatttcctatggtacaaaaaataccctgctgaaggtcctacattcctgatatctataagttccattaaggataaaaatgaagatggaagattcactgttttcttaaacaaaagtgccaagcacctctctctgcacattgtgccctcccagcctggagactctgcagtgtacttctgtgcagcaattgggggctcaaccctggggaggctatactttggaagaggaactcagttgactgtctggcctgatatccagaaccctgaccctgccgtgtaccagctgagagactctaaatccagtgacaagtctgtctgcctattcaccgattttgattctcaaacaaatgtgtcacaaagtaaggattctgatgtgtatatcacagacaaaactgtgctagacatgaggtctatggacttcaagagcaacagtgctgtggcctggagcaacaaatctgactttgcatgtgcaaacgccttcaacaacagcattattccagaagacaccttcttccccagcccagaaagttcctgtgatgtcaagctggtcgagaaaagctttgaaacagatacgaacctaaactttcaaaacctgtcagtgattgggttccgaatcctcctcctgaaagtggccgggtttaatctgctcatgacgctgcggctgtggtccagc

SEQ ID NO: 1137 - DNA, 816 bp, Homo sapiens
  TCR_27Alpha chain
atgatatccttgagagttttactggtgatcctgtggcttcagttaagctgggtttggagccaacggaaggaggtggagcaggatcctggacccttcaatgttccagagggagccactgtcgctttcaactgtacttacagcaacagtgcttctcagtctttcttctggtacagacaggattgcaggaaagaacctaagttgctgatgtccgtatactccagtggtaatgaagatggaaggtttacagcacagctcaatagagccagccagtatatttccctgctcatcagagactccaagctcagtgattcagccacctacctctgtgtggtgatcactggtggctacaataagctgatttttggagcagggaccaggctggctgtacacccatatatccagaaccctgaccctgccgtgtaccagctgagagactctaaatccagtgacaagtctgtctgcctattcaccgattttgattctcaaacaaatgtgtcacaaagtaaggattctgatgtgtatatcacagacaaaactgtgctagacatgaggtctatggacttcaagagcaacagtgctgtggcctggagcaacaaatctgactttgcatgtgcaaacgccttcaacaacagcattattccagaagacaccttcttccccagcccagaaagttcctgtgatgtcaagctggtcgagaaaagctttgaaacagatacgaacctaaactttcaaaacctgtcagtgattgggttccgaatcctcctcctgaaagtggccgggtttaatctgctcatgacgctgcggctgtggtccagc

SEQ ID NO: 1138 - DNA, 819 bp, Homo sapiens
  TCR_28Alpha chain
atgctcctgttgctcataccagtgctggggatgatttttgccctgagagatgccagagcccagtctgtgagccagcataaccaccacgtaattctctctgaagcagcctcactggagttgggatgcaactattcctatggtggaactgttaatctcttctggtatgtccagtaccctggtcaacaccttcagcttctcctcaagtacttttcaggggatccactggttaaaggcatcaagggctttgaggctgaatttataaagagtaaattctcctttaatctgaggaaaccctctgtgcagtggagtgacacagctgagtacttctgtgcctggatcctctcaggaaacacacctcttgtctttggaaagggcacaagactttctgtgattgcaaatatccagaaccctgaccctgccgtgtaccagctgagagactctaaatccagtgacaagtctgtctgcctattcaccgattttgattctcaaacaaatgtgtcacaaagtaaggattctgatgtgtatatcacagacaaaactgtgctagacatgaggtctatggacttcaagagcaacagtgctgtggcctggagcaacaaatctgactttgcatgtgcaaacgccttcaacaacagcattattccagaagacaccttcttccccagcccagaaagttcctgtgatgtcaagctggtcgagaaaagctttgaaacagatacgaacctaaactttcaaaacctgtcagtgattgggttccgaatcctcctcctgaaagtggccgggtttaatctgctcatgacgctgcggctgtggtccagc

SEQ ID NO: 1139 - DNA, 822 bp, Homo sapiens
  TCR_29Alpha chain
atgatatccttgagagttttactggtgatcctgtggcttcagttaagctgggtttggagccaacggaaggaggtggagcaggatcctggacccttcaatgttccagagggagccactgtcgctttcaactgtacttacagcaacagtgcttctcagtctttcttctggtacagacaggattgcaggaaagaacctaagttgctgatgtcggtatactccagtggtaatgaagatggaaggtttacagcacagctcaatagagccagccagtatatttccctgctcatcagagactccaagctcagtgattcagccacctacctctgtgtggtgaacgacccgaattcaggaaacacacctcttgtctttggaaagggcacaagactttctgtgattgcaaatatccagaaccctgaccctgccgtgtaccagctgagagactctaaatccagtgacaagtctgtctgcctattcaccgattttgattctcaaacaaatgtgtcacaaagtaaggattctgatgtgtatatcacagacaaaactgtgctagacatgaggtctatggacttcaagagcaacagtgctgtggcctggagcaacaaatctgactttgcatgtgcaaacgccttcaacaacagcattattccagaagacaccttcttccccagcccagaaagttcctgtgatgtcaagctggtcgagaaaagctttgaaacagatacgaacctaaactttcaaaacctgtcagtgattgggttccgaatcctcctcctgaaagtggccgggtttaatctgctcatgacgctgcggctgtggtccagc

SEQ ID NO: 1140 - DNA, 831 bp, Homo sapiens
  TCR_30Alpha chain
atggagactctcctgaaagtgctttcaggcaccttgttgtggcagttgacctgggtgagaagccaacaaccagtgcagagtcctcaagccgtgatcctccgagaaggggaagatgctgtcatcaactgcagttcctccaaggctttatattctgtacactggtacaggcagaagcatggtgaagcacccgtcttcctgatgatattactgaagggtggagaacagaagggtcatgaaaaaatatctgcttcatttaatgaaaaaaagcagcaaagctccctgtaccttacggcctcccagctcagttactcaggaacctacttctgcggcacagccttctttaatgctggtggtactagctatggaaagctgacatttggacaagggaccatcttgactgtccatccaaatatccagaaccctgaccctgccgtgtaccagctgagagactctaaatccagtgacaagtctgtctgcctattcaccgattttgattctcaaacaaatgtgtcacaaagtaaggattctgatgtgtatatcacagacaaaactgtgctagacatgaggtctatggacttcaagagcaacagtgctgtggcctggagcaacaaatctgactttgcatgtgcaaacgccttcaacaacagcattattccagaagacaccttcttccccagcccagaaagttcctgtgatgtcaagctggtcgagaaaagctttgaaacagatacgaacctaaactttcaaaacctgtcagtgattgggttccgaatcctcctcctgaaagtggccgggtttaatctgctcatgacgctgcggctgtggtccagc

SEQ ID NO: 1141 - DNA, 825 bp, Homo sapiens
  TCR_31Alpha chain
atggagaagaatcctttggcagccccattactaatcctctggtttcatcttgactgcgtgagcagcatactgaacgtggaacaaagtcctcagtcactgcatgttcaggagggagacagcaccaatttcacctgcagcttcccttccagcaatttttatgccttacactggtacagatgggaaactgcaaaaagccccgaggccttgtttgtaatgactttaaatggggatgaaaagaagaaaggacgaataagtgccactcttaataccaaggagggttacagctatttgtacatcaaaggatcccagcctgaagactcagccacatacctctgtgccttgggaaatactggaggcttcaaaactatctttggagcaggaacaagactatttgttaaagcaaatatccagaaccctgaccctgccgtgtaccagctgagagactctaaatccagtgacaagtctgtctgcctattcaccgattttgattctcaaacaaatgtgtcacaaagtaaggattctgatgtgtatatcacagacaaaactgtgctagacatgaggtctatggacttcaagagcaacagtgctgtggcctggagcaacaaatctgactttgcatgtgcaaacgccttcaacaacagcattattccagaagacaccttcttccccagcccagaaagttcctgtgatgtcaagctggtcgagaaaagctttgaaacagatacgaacctaaactttcaaaacctgtcagtgattgggttccgaatcctcctcctgaaagtggccgggtttaatctgctcatgacgctgcggctgtggtccagc

SEQ ID NO: 1142 - DNA, 819 bp, Homo sapiens
  TCR_32Alpha chain
atggcatgccctggcttcctgtgggcacttgtgatctccacctgtcttgaatttagcatggctcagacagtcactcagtctcaaccagagatgtctgtgcaggaggcagagaccgtgaccctgagctgcacatatgacaccagtgagagtgattattatttattctggtacaagcagcctcccagcaggcagatgattctcgttattcgccaagaagcttataagcaacagaatgcaacagagaatcgtttctctgtgaacttccagaaagcagccaaatccttcagtctcaagatctcagactcacagctgggggatgccgcgatgtatttctgtgcttatatggacaacaatgacatgcgctttggagcagggaccagactgacagtaaaaccaaatatccagaaccctgaccctgccgtgtaccagctgagagactctaaatccagtgacaagtctgtctgcctattcaccgattttgattctcaaacaaatgtgtcacaaagtaaggattctgatgtgtatatcacagacaaaactgtgctagacatgaggtctatggacttcaagagcaacagtgctgtggcctggagcaacaaatctgactttgcatgtgcaaacgccttcaacaacagcattattccagaagacaccttcttccccagcccagaaagttcctgtgatgtcaagctggtcgagaaaagctttgaaacagatacgaacctaaactttcaaaacctgtcagtgattgggttccgaatcctcctcctgaaagtggccgggtttaatctgctcatgacgctgcggctgtggtccagc

SEQ ID NO: 1143 - DNA, 807 bp, Homo sapiens
  TCR_33Alpha chain
atgaagcccaccctcatctcagtgcttgtgataatatttatactcagaggaacaagagcccagagagtgactcagcccgagaagctcctctctgtctttaaaggggccccagtggagctgaagtgcaactattcctattctgggagtcctgaactcttctggtatgtccagtactccagacaacgcctccagttactcttgagacacatctctagagagagcatcaaaggcttcactgctgaccttaacaaaggcgagacatctttccacctgaagaaaccatttgctcaagaggaagactcagccatgtattactgtgctctaggggcactaactggtcagaattttgtctttggtcccggaaccagattgtccgtgctgccctatatccagaaccctgaccctgccgtgtaccagctgagagactctaaatccagtgacaagtctgtctgcctattcaccgattttgattctcaaacaaatgtgtcacaaagtaaggattctgatgtgtatatcacagacaaaactgtgctagacatgaggtctatggacttcaagagcaacagtgctgtggcctggagcaacaaatctgactttgcatgtgcaaacgccttcaacaacagcattattccagaagacaccttcttccccagcccagaaagttcctgtgatgtcaagctggtcgagaaaagctttgaaacagatacgaacctaaactttcaaaacctgtcagtgattgggttccgaatcctcctcctgaaagtggccgggtttaatctgctcatgacgctgcggctgtggtccagc

SEQ ID NO: 1144 - DNA, 816 bp, Homo sapiens
  TCR_34Alpha chain
atggcatgccctggcttcctgtgggcacttgtgatctccacctgtcttgaatttagcatggctcagacagtcactcagtctcaaccagagatgtctgtgcaggaggcagagaccgtgaccctgagctgcacatatgacaccagtgagagtgattattatttattctggtacaagcagcctcccagcaggcagatgattctcgttattcgccaagaagcttataagcaacagaatgcaacagagaatcgtttctctgtgaacttccagaaagcagccaaatccttcagtctcaagatctcagactcacagctgggggatgccgcgatgtatttctgtgcttatcacgagagagcacttacttttgggagtggaacaagactccaagtgcaaccaaatatccagaaccctgaccctgccgtgtaccagctgagagactctaaatccagtgacaagtctgtctgcctattcaccgattttgattctcaaacaaatgtgtcacaaagtaaggattctgatgtgtatatcacagacaaaactgtgctagacatgaggtctatggacttcaagagcaacagtgctgtggcctggagcaacaaatctgactttgcatgtgcaaacgccttcaacaacagcattattccagaagacaccttcttccccagcccagaaagttcctgtgatgtcaagctggtcgagaaaagctttgaaacagatacgaacctaaactttcaaaacctgtcagtgattgggttccgaatcctcctcctgaaagtggccgggtttaatctgctcatgacgctgcggctgtggtccagc

SEQ ID NO: 1145 - DNA, 828 bp, Homo sapiens
  TCR_35Alpha chain
atggagaagaatcctttggcagccccattactaatcctctggtttcatcttgactgcgtgagcagcatactgaacgtggaacaaagtcctcagtcactgcatgttcaggagggagacagcaccaatttcacctgcagcttcccttccagcaatttttatgccttacactggtacagatgggaaactgcaaaaagccccgaggccttgtttgtaatgactttaaatggggatgaaaagaagaaaggacgaataagtgccactcttaataccaaggagggttacagctatttgtacatcaaaggatcccagcctgaagactcagccacatacctctgtgccttccctagtggaggtagcaactataaactgacatttggaaaaggaactctcttaaccgtgaatccaaatatccagaaccctgaccctgccgtgtaccagctgagagactctaaatccagtgacaagtctgtctgcctattcaccgattttgattctcaaacaaatgtgtcacaaagtaaggattctgatgtgtatatcacagacaaaactgtgctagacatgaggtctatggacttcaagagcaacagtgctgtggcctggagcaacaaatctgactttgcatgtgcaaacgccttcaacaacagcattattccagaagacaccttcttccccagcccagaaagttcctgtgatgtcaagctggtcgagaaaagctttgaaacagatacgaacctaaactttcaaaacctgtcagtgattgggttccgaatcctcctcctgaaagtggccgggtttaatctgctcatgacgctgcggctgtggtccagc

SEQ ID NO: 1146 - DNA, 798 bp, Homo sapiens
  TCR_36Alpha chain
atgaggcaagtggcgagagtgatcgtgttcctgaccctgagtactttgagccttgctaagaccacccagcccatctccatggactcatatgaaggacaagaagtgaacataacctgtagccacaacaacattgctacaaatgattatatcacgtggtaccaacagtttcccagccaaggaccacgatttattattcaaggatacaagacaaaagttacaaacgaagtggcctccctgtttatccctgccgacagaaagtccagcactctgagcctgccccgggtttccctgagcgacactgctgtgtactactgcctcgcggtaaacaccgacaagctcatctttgggactgggaccagattacaagtctttccaaatatccagaaccctgaccctgccgtgtaccagctgagagactctaaatccagtgacaagtctgtctgcctattcaccgattttgattctcaaacaaatgtgtcacaaagtaaggattctgatgtgtatatcacagacaaaactgtgctagacatgaggtctatggacttcaagagcaacagtgctgtggcctggagcaacaaatctgactttgcatgtgcaaacgccttcaacaacagcattattccagaagacaccttcttccccagcccagaaagttcctgtgatgtcaagctggtcgagaaaagctttgaaacagatacgaacctaaactttcaaaacctgtcagtgattgggttccgaatcctcctcctgaaagtggccgggtttaatctgctcatgacgctgcggctgtggtccagc

SEQ ID NO: 1147 - DNA, 837 bp, Homo sapiens
  TCR_37Alpha chain
atgtcactttctagcctgctgaaggtggtcacagcttcactgtggctaggacctggcattgcccagaagataactcaaacccaaccaggaatgttcgtgcaggaaaaggaggctgtgactctggactgcacatatgacaccagtgatccaagttatggtctattctggtacaagcagcccagcagtggggaaatgatttttcttatttatcaggggtcttatgaccagcaaaatgcaacagaaggtcgctactcattgaatttccagaaggcaagaaaatccgccaaccttgtcatctccgcttcacaactgggggactcagcaatgtatttctgtgcaatgagaggggctataaataccggcactgccagtaaactcacctttgggactggaacaagacttcaggtcacgctcgatatccagaaccctgaccctgccgtgtaccagctgagagactctaaatccagtgacaagtctgtctgcctattcaccgattttgattctcaaacaaatgtgtcacaaagtaaggattctgatgtgtatatcacagacaaaactgtgctagacatgaggtctatggacttcaagagcaacagtgctgtggcctggagcaacaaatctgactttgcatgtgcaaacgccttcaacaacagcattattccagaagacaccttcttccccagcccagaaagttcctgtgatgtcaagctggtcgagaaaagctttgaaacagatacgaacctaaactttcaaaacctgtcagtgattgggttccgaatcctcctcctgaaagtggccgggtttaatctgctcatgacgctgcggctgtggtccagc

SEQ ID NO: 1148 - DNA, 804 bp, Homo sapiens
  TCR_38Alpha chain
atggtcctgaaattctccgtgtccattctttggattcagttggcatgggtgagcacccagctgctggagcagagccctcagtttctaagcatccaagagggagaaaatctcactgtgtactgcaactcctcaagtgttttttccagcttacaatggtacagacaggagcctggggaaggtcctgtcctcctggtgacagtagttacgggtggagaagtgaagaagctgaagagactaacctttcagtttggtgatgcaagaaaggacagttctctccacatcactgcagcccagcctggtgatacaggcctctacctctgtgcaggagccggtggccagaagctgctctttgcaaggggaaccatgttaaaggtggatcttaatatccagaaccctgaccctgccgtgtaccagctgagagactctaaatccagtgacaagtctgtctgcctattcaccgattttgattctcaaacaaatgtgtcacaaagtaaggattctgatgtgtatatcacagacaaaactgtgctagacatgaggtctatggacttcaagagcaacagtgctgtggcctggagcaacaaatctgactttgcatgtgcaaacgccttcaacaacagcattattccagaagacaccttcttccccagcccagaaagttcctgtgatgtcaagctggtcgagaaaagctttgaaacagatacgaacctaaactttcaaaacctgtcagtgattgggttccgaatcctcctcctgaaagtggccgggtttaatctgctcatgacgctgcggctgtggtccagc

SEQ ID NO: 1149 - DNA, 813 bp, Homo sapiens
  TCR_39Alpha chain
atggtcctgaaattctccgtgtccattctttggattcagttggcatgggtgagcacccagctgctggagcagagccctcagtttctaagcatccaagagggagaaaatctcactgtgtactgcaactcctcaagtgttttttccagcttacaatggtacagacaggagcctggggaaggtcctgtcctcctggtgacagtagttacgggtggagaagtgaagaagctgaagagactaacctttcagtttggtgatgcaagaaaggacagttctctccacatcactgcagcccagcctggtgatacaggcctctacctctgtgcaggagctagatctggcaacacaggcaaactaatctttgggcaagggacaactttacaagtaaaaccagatatccagaaccctgaccctgccgtgtaccagctgagagactctaaatccagtgacaagtctgtctgcctattcaccgattttgattctcaaacaaatgtgtcacaaagtaaggattctgatgtgtatatcacagacaaaactgtgctagacatgaggtctatggacttcaagagcaacagtgctgtggcctggagcaacaaatctgactttgcatgtgcaaacgccttcaacaacagcattattccagaagacaccttcttccccagcccagaaagttcctgtgatgtcaagctggtcgagaaaagctttgaaacagatacgaacctaaactttcaaaacctgtcagtgattgggttccgaatcctcctcctgaaagtggccgggtttaatctgctcatgacgctgcggctgtggtccagc

SEQ ID NO: 1150 - DNA, 816 bp, Homo sapiens
  TCR_40Alpha chain
atggagactctcctgaaagtgctttcaggcaccttgttgtggcagttgacctgggtgagaagccaacaaccagtgcagagtcctcaagccgtgatcctccgagaaggggaagatgctgtcatcaactgcagttcctccaaggctttatattctgtacactggtacaggcagaagcatggtgaagcacccatcttcctgatgatattactgaagggtggagaacagaagggtcatgacaaaatatctgcttcatttaatgaaaaaaagcagcaaagctccctgtaccttacggcctcccagctcagttactcaggaacctacttctgtggcacagagagcccaggcaacaatgacatgcgctttggagcagggaccagactgacagtaaaaccaaatatccagaaccctgaccctgccgtgtaccagctgagagactctaaatccagtgacaagtctgtctgcctattcaccgattttgattctcaaacaaatgtgtcacaaagtaaggattctgatgtgtatatcacagacaaaactgtgctagacatgaggtctatggacttcaagagcaacagtgctgtggcctggagcaacaaatctgactttgcatgtgcaaacgccttcaacaacagcattattccagaagacaccttcttccccagcccagaaagttcctgtgatgtcaagctggtcgagaaaagctttgaaacagatacgaacctaaactttcaaaacctgtcagtgattgggttccgaatcctcctcctgaaagtggccgggtttaatctgctcatgacgctgcggctgtggtccagc

SEQ ID NO: 1151 - DNA, 816 bp, Homo sapiens
  TCR_41Alpha chain
atggcaggcattcgagctttatttatgtacttgtggctgcagctggactgggtgagcagaggagagagtgtggggctgcatcttcctaccctgagtgtccaggagggtgacaactctattatcaactgtgcttattcaaacagcgcctcagactacttcatttggtacaagcaagaatctggaaaaggtcctcaattcattatagacattcgttcaaatatggacaaaaggcaaggccaaagagtcaccgttttattgaataagacagtgaaacatctctctctgcaaattgcagctactcaacctggagactcagctgtctacttttgtgcagcctcgacggggggccagaagctgctctttgcaaggggaaccatgttaaaggtggatcttaatatccagaaccctgaccctgccgtgtaccagctgagagactctaaatccagtgacaagtctgtctgcctattcaccgattttgattctcaaacaaatgtgtcacaaagtaaggattctgatgtgtatatcacagacaaaactgtgctagacatgaggtctatggacttcaagagcaacagtgctgtggcctggagcaacaaatctgactttgcatgtgcaaacgccttcaacaacagcattattccagaagacaccttcttccccagcccagaaagttcctgtgatgtcaagctggtcgagaaaagctttgaaacagatacgaacctaaactttcaaaacctgtcagtgattgggttccgaatcctcctcctgaaagtggccgggtttaatctgctcatgacgctgcggctgtggtccagc

SEQ ID NO: 1152 - DNA, 810 bp, Homo sapiens
  TCR_42Alpha chain
atgatatccttgagagttttactggtgatcctgtggcttcagttaagctgggtttggagccaacggaaggaggtggagcaggatcctggacccttcaatgttccagagggagccactgtcgctttcaactgtacttacagcaacagtgcttctcagtctttcttctggtacagacaggattgcaggaaagaacctaagttgctgatgtccgtatactccagtggtaatgaagatggaaggtttacagcacagctcaatagagccagccagtatatttccctgctcatcagagactccaagctcagtgattcagccacctacctctgtgtggtgaacaaggacaatgacatgcgctttggagcagggaccagactgacagtaaaaccaaatatccagaaccctgaccctgccgtgtaccagctgagagactctaaatccagtgacaagtctgtctgcctattcaccgattttgattctcaaacaaatgtgtcacaaagtaaggattctgatgtgtatatcacagacaaaactgtgctagacatgaggtctatggacttcaagagcaacagtgctgtggcctggagcaacaaatctgactttgcatgtgcaaacgccttcaacaacagcattattccagaagacaccttcttccccagcccagaaagttcctgtgatgtcaagctggtcgagaaaagctttgaaacagatacgaacctaaactttcaaaacctgtcagtgattgggttccgaatcctcctcctgaaagtggccgggtttaatctgctcatgacgctgcggctgtggtccagc

SEQ ID NO: 1153 - DNA, 813 bp, Homo sapiens
  TCR_43Alpha chain
atgaaatccttgagagttttactagtgatcctgtggcttcagttgagctgggtttggagccaacagaaggaggtggagcagaattctggacccctcagtgttccagagggagccattgcctctctcaactgcacttacagtgaccgaggttcccagtccttcttctggtacagacaatattctgggaaaagccctgagttgataatgttcatatactccaatggtgacaaagaagatggaaggtttacagcacagctcaataaagccagccagtatgtttctctgctcatcagagactcccagcccagtgattcagccacctacctctgtgccgccggtcgggatgacaagatcatctttggaaaagggacacgacttcatattctccccaatatccagaaccctgaccctgccgtgtaccagctgagagactctaaatccagtgacaagtctgtctgcctattcaccgattttgattctcaaacaaatgtgtcacaaagtaaggattctgatgtgtatatcacagacaaaactgtgctagacatgaggtctatggacttcaagagcaacagtgctgtggcctggagcaacaaatctgactttgcatgtgcaaacgccttcaacaacagcattattccagaagacaccttcttccccagcccagaaagttcctgtgatgtcaagctggtcgagaaaagctttgaaacagatacgaacctaaactttcaaaacctgtcagtgattgggttccgaatcctcctcctgaaagtggccgggtttaatctgctcatgacgctgcggctgtggtccagc

SEQ ID NO: 1154 - DNA, 831 bp, Homo sapiens
  TCR_44Alpha chain
atgctgactgccagcctgttgagggcagtcatagcctccatctgtgttgtatccagcatggctcagaaggtaactcaagcgcagactgaaatttctgtggtggagaaggaggatgtgaccttggactgtgtgtatgaaacccgtgatactacttattacttattctggtacaagcaaccaccaagtggagaattggttttccttattcgtcggaactcttttgatgagcaaaatgaaataagtggtcggtattcttggaacttccagaaatccaccagttccttcaacttcaccatcacagcctcacaagtcgtggactcagcagtatacttctgtgctctgagtgttcgaattcagggagcccagaagctggtatttggccaaggaaccaggctgactatcaacccaaatatccagaaccctgaccctgccgtgtaccagctgagagactctaaatccagtgacaagtctgtctgcctattcaccgattttgattctcaaacaaatgtgtcacaaagtaaggattctgatgtgtatatcacagacaaaactgtgctagacatgaggtctatggacttcaagagcaacagtgctgtggcctggagcaacaaatctgactttgcatgtgcaaacgccttcaacaacagcattattccagaagacaccttcttccccagcccagaaagttcctgtgatgtcaagctggtcgagaaaagctttgaaacagatacgaacctaaactttcaaaacctgtcagtgattgggttccgaatcctcctcctgaaagtggccgggtttaatctgctcatgacgctgcggctgtggtccagc

SEQ ID NO: 1155 - DNA, 810 bp, Homo sapiens
  TCR_45Alpha chain
atggagaccctcttgggcctgcttatcctttggctgcagctgcaatgggtgagcagcaaacaggaggtgacacagattcctgcagctctgagtgtcccagaaggagaaaacttggttctcaactgcagtttcactgatagcgctatttacaacctccagtggtttaggcaggaccctgggaaaggtctcacatctctgttgcttattcagtcaagtcagagagagcaaacaagtggaagacttaatgcctcgctggataaatcatcaggacgtagtactttatacattgcagcttctcagcctggtgactcagccacctacctctgtgctgtgtggaggtttcagaaacttgtatttggaactggcacccgacttctggtcagtccaaatatccagaaccctgaccctgccgtgtaccagctgagagactctaaatccagtgacaagtctgtctgcctattcaccgattttgattctcaaacaaatgtgtcacaaagtaaggattctgatgtgtatatcacagacaaaactgtgctagacatgaggtctatggacttcaagagcaacagtgctgtggcctggagcaacaaatctgactttgcatgtgcaaacgccttcaacaacagcattattccagaagacaccttcttccccagcccagaaagttcctgtgatgtcaagctggtcgagaaaagctttgaaacagatacgaacctaaactttcaaaacctgtcagtgattgggttccgaatcctcctcctgaaagtggccgggtttaatctgctcatgacgctgcggctgtggtccagc

SEQ ID NO: 1156 - DNA, 825 bp, Homo sapiens
  TCR_46Alpha chain
atgaagacatttgctggattttcgttcctgtttttgtggctgcagctggactgtatgagtagaggagaggatgtggagcagagtcttttcctgagtgtccgagagggagacagctccgttataaactgcacttacacagacagctcctccacctacttatactggtataagcaagaacctggagcaggtctccagttgctgacgtatattttttcaaatatggacatgaaacaagaccaaagactcactgttctattgaataaaaaggataaacatctgtctctgcgcattgcagacacccagactggggactcagctatctacttctgtgcagagagtgccctgggaggaagccaaggaaatctcatctttggaaaaggcactaaactctctgttaaaccaaatatccagaaccctgaccctgccgtgtaccagctgagagactctaaatccagtgacaagtctgtctgcctattcaccgattttgattctcaaacaaatgtgtcacaaagtaaggattctgatgtgtatatcacagacaaaactgtgctagacatgaggtctatggacttcaagagcaacagtgctgtggcctggagcaacaaatctgactttgcatgtgcaaacgccttcaacaacagcattattccagaagacaccttcttccccagcccagaaagttcctgtgatgtcaagctggtcgagaaaagctttgaaacagatacgaacctaaactttcaaaacctgtcagtgattgggttccgaatcctcctcctgaaagtggccgggtttaatctgctcatgacgctgcggctgtggtccagc

SEQ ID NO: 1157 - DNA, 813 bp, Homo sapiens
  TCR_47Alpha chain
atgatatccttgagagttttactggtgatcctgtggcttcagttaagctgggtttggagccaacggaaggaggtggagcaggatcctggacccttcaatgttccagagggagccactgtcgctttcaactgtacttacagcaacagtgcttctcagtctttcttctggtacagacaggattgcaggaaagaacctaagttgctgatgtccgtatactccagtggtaatgaagatggaaggtttacagcacagctcaatagagccagccagtatatttccctgctcatcagagactccaagctcagtgattcagccacctacctctgtgtggtgaactcaggaaacacacctcttgtctttggaaagggcacaagactttctgtgattgcaaatatccagaaccctgaccctgccgtgtaccagctgagagactctaaatccagtgacaagtctgtctgcctattcaccgattttgattctcaaacaaatgtgtcacaaagtaaggattctgatgtgtatatcacagacaaaactgtgctagacatgaggtctatggacttcaagagcaacagtgctgtggcctggagcaacaaatctgactttgcatgtgcaaacgccttcaacaacagcattattccagaagacaccttcttccccagcccagaaagttcctgtgatgtcaagctggtcgagaaaagctttgaaacagatacgaacctaaactttcaaaacctgtcagtgattgggttccgaatcctcctcctgaaagtggccgggtttaatctgctcatgacgctgcggctgtggtccagc

SEQ ID NO: 1158 - DNA, 813 bp, Homo sapiens
  TCR_48Alpha chain
atgaggcaagtggcgagagtgatcgtgttcctgaccctgagtactttgagccttgctaagaccacccagcccatctccatggactcatatgaaggacaagaagtgaacataacctgtagccacaacaacattgctacaaatgattatatcacgtggtaccaacagtttcccagccaaggaccacgatttattattcaaggatacaagacaaaagttacaaacgaagtggcctccctgtttatccctgccgacagaaagtccagcactctgagcctgccccgggtttccctgagcgacactgctgtgtactactgcctcgtgggtggatgggtgtcaggaggaagctacatacctacatttggaagaggaaccagccttattgttcatccgtatatccagaaccctgaccctgccgtgtaccagctgagagactctaaatccagtgacaagtctgtctgcctattcaccgattttgattctcaaacaaatgtgtcacaaagtaaggattctgatgtgtatatcacagacaaaactgtgctagacatgaggtctatggacttcaagagcaacagtgctgtggcctggagcaacaaatctgactttgcatgtgcaaacgccttcaacaacagcattattccagaagacaccttcttccccagcccagaaagttcctgtgatgtcaagctggtcgagaaaagctttgaaacagatacgaacctaaactttcaaaacctgtcagtgattgggttccgaatcctcctcctgaaagtggccgggtttaatctgctcatgacgctgcggctgtggtccagc

SEQ ID NO: 1159 - DNA, 822 bp, Homo sapiens
  TCR_49Alpha chain
atggcatgccctggcttcctgtgggcacttgtgatctccacctgtcttgaatttagcatggctcagacagtcactcagtctcaaccagagatgtctgtgcaggaggcagagaccgtgaccctgagctgcacatatgacaccagtgagagtgattattatttattctggtacaagcagcctcccagcaggcagatgattctcgttattcgccaagaagcttataagcaacagaatgcaacagagaatcgtttctctgtgaacttccagaaagcagccaaatccttcagtctcaagatctcagactcacagctgggggatgccgcgatgtatttctgtgcttatacggagaacaatgccagactcatgtttggagatggaactcagctggtggtgaagcccaatatccagaaccctgaccctgccgtgtaccagctgagagactctaaatccagtgacaagtctgtctgcctattcaccgattttgattctcaaacaaatgtgtcacaaagtaaggattctgatgtgtatatcacagacaaaactgtgctagacatgaggtctatggacttcaagagcaacagtgctgtggcctggagcaacaaatctgactttgcatgtgcaaacgccttcaacaacagcattattccagaagacaccttcttccccagcccagaaagttcctgtgatgtcaagctggtcgagaaaagctttgaaacagatacgaacctaaactttcaaaacctgtcagtgattgggttccgaatcctcctcctgaaagtggccgggtttaatctgctcatgacgctgcggctgtggtccagc

SEQ ID NO: 1160 - DNA, 816 bp, Homo sapiens
  TCR_50Alpha chain
atgatatccttgagagttttactggtgatcctgtggcttcagttaagctgggtttggagccaacggaaggaggtggagcaggatcctggacccttcaatgttccagagggagccactgtcgctttcaactgtacttacagcaacagtgcttctcagtctttcttctggtacagacaggattgcaggaaagaacctaagttgctgatgtccgtatactccagtggtaatgaagatggaaggtttacagcacagctcaatagagccagccagtatatttccctgctcatcagagactccaagctcagtgattcagccacctacctctgtgtggtgagagctgacagctgggggaaattgcagtttggagcagggacccaggttgtggtcaccccagatatccagaaccctgaccctgccgtgtaccagctgagagactctaaatccagtgacaagtctgtctgcctattcaccgattttgattctcaaacaaatgtgtcacaaagtaaggattctgatgtgtatatcacagacaaaactgtgctagacatgaggtctatggacttcaagagcaacagtgctgtggcctggagcaacaaatctgactttgcatgtgcaaacgccttcaacaacagcattattccagaagacaccttcttccccagcccagaaagttcctgtgatgtcaagctggtcgagaaaagctttgaaacagatacgaacctaaactttcaaaacctgtcagtgattgggttccgaatcctcctcctgaaagtggccgggtttaatctgctcatgacgctgcggctgtggtccagc

SEQ ID NO: 1161 - DNA, 822 bp, Homo sapiens
  TCR_51Alpha chain
atggcatgccctggcttcctgtgggcacttgtgatctccacctgtcttgaatttagcatggctcagacagtcactcagtctcaaccagagatgtctgtgcaggaggcagagaccgtgaccctgagctgcacatatgacaccagtgagagtgattattatttattctggtacaagcagcctcccagcaggcagatgattctcgttattcgccaagaagcttataagcaacagaatgcaacagagaatcgtttctctgtgaacttccagaaagcagccaaatccttcagtctcaagatctcagactcacagctgggggatgccgcgatgtatttctgtgcttatattgagaccggtaaccagttctattttgggacagggacaagtttgacggtcattccaaatatccagaaccctgaccctgccgtgtaccagctgagagactctaaatccagtgacaagtctgtctgcctattcaccgattttgattctcaaacaaatgtgtcacaaagtaaggattctgatgtgtatatcacagacaaaactgtgctagacatgaggtctatggacttcaagagcaacagtgctgtggcctggagcaacaaatctgactttgcatgtgcaaacgccttcaacaacagcattattccagaagacaccttcttccccagcccagaaagttcctgtgatgtcaagctggtcgagaaaagctttgaaacagatacgaacctaaactttcaaaacctgtcagtgattgggttccgaatcctcctcctgaaagtggccgggtttaatctgctcatgacgctgcggctgtggtccagc

SEQ ID NO: 1162 - DNA, 816 bp, Homo sapiens
  TCR_52Alpha chain
atgatatccttgagagttttactggtgatcctgtggcttcagttaagctgggtttggagccaacggaaggaggtggagcaggatcctggacccttcaatgttccagagggagccactgtcgctttcaactgtacttacagcaacagtgcttctcagtctttcttctggtacagacaggattgcaggaaagaacctaagttgctgatgtccgtatactccagtggtaatgaagatggaaggtttacagcacagctcaatagagccagccagtatatttccctgctcatcagagactccaagctcagtgattcagccacctacctctgtgtggtgagatatgacagctgggggaaattgcagtttggagcagggacccaggttgtggtcaccccagatatccagaaccctgaccctgccgtgtaccagctgagagactctaaatccagtgacaagtctgtctgcctattcaccgattttgattctcaaacaaatgtgtcacaaagtaaggattctgatgtgtatatcacagacaaaactgtgctagacatgaggtctatggacttcaagagcaacagtgctgtggcctggagcaacaaatctgactttgcatgtgcaaacgccttcaacaacagcattattccagaagacaccttcttccccagcccagaaagttcctgtgatgtcaagctggtcgagaaaagctttgaaacagatacgaacctaaactttcaaaacctgtcagtgattgggttccgaatcctcctcctgaaagtggccgggtttaatctgctcatgacgctgcggctgtggtccagc

SEQ ID NO: 1163 - DNA, 828 bp, Homo sapiens
  TCR_53Alpha chain
atgctgactgccagcctgttgagggcagtcatagcctccatctgtgttgtatccagcatggctcagaaggtaactcaagcgcagactgaaatttctgtggtggagaaggaggatgtgaccttggactgtgtgtatgaaacccgtgatactacttattacttattctggtacaagcaaccaccaagtggagaattggttttccttattcgtcggaactcttttgatgagcaaaatgaaataagtggtcggtattcttggaacttccagaaatccaccagttccttcaacttcaccatcacagcctcacaagtcgtggactcagcagtatacttctgtgctctgatggaggctaaccagggaggaaagcttatcttcggacagggaacggagttatctgtgaaacccaatatccagaaccctgaccctgccgtgtaccagctgagagactctaaatccagtgacaagtctgtctgcctattcaccgattttgattctcaaacaaatgtgtcacaaagtaaggattctgatgtgtatatcacagacaaaactgtgctagacatgaggtctatggacttcaagagcaacagtgctgtggcctggagcaacaaatctgactttgcatgtgcaaacgccttcaacaacagcattattccagaagacaccttcttccccagcccagaaagttcctgtgatgtcaagctggtcgagaaaagctttgaaacagatacgaacctaaactttcaaaacctgtcagtgattgggttccgaatcctcctcctgaaagtggccgggtttaatctgctcatgacgctgcggctgtggtccagc

SEQ ID NO: 1164 - DNA, 822 bp, Homo sapiens
  TCR_54Alpha chain
atgatgaaatccttgagagttttactggtgatcctgtggcttcagttaagctgggtttggagccaacagaaggaggtggagcaggatcctggaccactcagtgttccagagggagccattgtttctctcaactgcacttacagcaacagtgcttttcaatacttcatgtggtacagacagtattccagaaaaggccctgagttgctgatgtacacatactccagtggtaacaaagaagatggaaggtttacagcacaggtcgataaatccagcaagtatatctccttgttcatcagagactcacagcccagtgattcagccacctacctctgtgcaatgcagtctgacagctgggggaaattgcagtttggagcagggacccaggttgtggtcaccccagatatccagaaccctgaccctgccgtgtaccagctgagagactctaaatccagtgacaagtctgtctgcctattcaccgattttgattctcaaacaaatgtgtcacaaagtaaggattctgatgtgtatatcacagacaaaactgtgctagacatgaggtctatggacttcaagagcaacagtgctgtggcctggagcaacaaatctgactttgcatgtgcaaacgccttcaacaacagcattattccagaagacaccttcttccccagcccagaaagttcctgtgatgtcaagctggtcgagaaaagctttgaaacagatacgaacctaaactttcaaaacctgtcagtgattgggttccgaatcctcctcctgaaagtggccgggtttaatctgctcatgacgctgcggctgtggtccagc

SEQ ID NO: 1165 - DNA, 810 bp, Homo sapiens
  TCR_55Alpha chain
atgacatccattcgagctgtatttatattcctgtggctgcagctggacttggtgaatggagagaatgtggagcagcatccttcaaccctgagtgtccaggagggagacagcgctgttatcaagtgtacttattcagacagtgcctcaaactacttcccttggtataagcaagaacttggaaaaagacctcagcttattatagacattcgttcaaatgtgggcgaaaagaaagaccaacgaattgctgttacattgaacaagacagccaaacatttctccctgcacatcacagagacccaacctgaagactcggctgtctacttctgttcgaaaacctcctacgacaaggtgatatttgggccagggacaagcttatcagtcattccaaatatccagaaccctgaccctgccgtgtaccagctgagagactctaaatccagtgacaagtctgtctgcctattcaccgattttgattctcaaacaaatgtgtcacaaagtaaggattctgatgtgtatatcacagacaaaactgtgctagacatgaggtctatggacttcaagagcaacagtgctgtggcctggagcaacaaatctgactttgcatgtgcaaacgccttcaacaacagcattattccagaagacaccttcttccccagcccagaaagttcctgtgatgtcaagctggtcgagaaaagctttgaaacagatacgaacctaaactttcaaaacctgtcagtgattgggttccgaatcctcctcctgaaagtggccgggtttaatctgctcatgacgctgcggctgtggtccagc

SEQ ID NO: 1166 - DNA, 825 bp, Homo sapiens
  TCR_56Alpha chain
atggcatgccctggcttcctgtgggcacttgtgatctccacctgtcttgaatttagcatggctcagacagtcactcagtctcaaccagagatgtctgtgcaggaggcagagaccgtgaccctgagctgcacatatgacaccagtgagagtgattattatttattctggtacaagcagcctcccagcaggcagatgattctcgttattcgccaagaagcttataagcaacagaatgcaacagagaatcgtttctctgtgaacttccagaaagcagccaaatccttcagtctcaagatctcagactcacagctgggggatgccgcgatgtatttctgtgctggcaataccggcactgccagtaaactcacctttgggactggaacaagacttcaggtcacgctcgatatccagaaccctgaccctgccgtgtaccagctgagagactctaaatccagtgacaagtctgtctgcctattcaccgattttgattctcaaacaaatgtgtcacaaagtaaggattctgatgtgtatatcacagacaaaactgtgctagacatgaggtctatggacttcaagagcaacagtgctgtggcctggagcaacaaatctgactttgcatgtgcaaacgccttcaacaacagcattattccagaagacaccttcttccccagcccagaaagttcctgtgatgtcaagctggtcgagaaaagctttgaaacagatacgaacctaaactttcaaaacctgtcagtgattgggttccgaatcctcctcctgaaagtggccgggtttaatctgctcatgacgctgcggctgtggtccagc

SEQ ID NO: 1167 - DNA, 804 bp, Homo sapiens
  TCR_57Alpha chain
atgtggggagttttccttctttatgtttccatgaagatgggaggcactacaggacaaaacattgaccagcccactgagatgacagctacggaaggtgccattgtccagatcaactgcacgtaccagacatctgggttcaacgggctgttctggtaccagcaacatgctggcgaagcacccacatttctgtcttacaatgttctggatggtttggaggagaaaggtcgtttttcttcattccttagtcggtctaaagggtacagttacctccttttgaaggagctccagatgaaagactctgcctcttacctctgtgctgtgtatggaggaagccaaggaaatctcatctttggaaaaggcactaaactctctgttaaaccaaatatccagaaccctgaccctgccgtgtaccagctgagagactctaaatccagtgacaagtctgtctgcctattcaccgattttgattctcaaacaaatgtgtcacaaagtaaggattctgatgtgtatatcacagacaaaactgtgctagacatgaggtctatggacttcaagagcaacagtgctgtggcctggagcaacaaatctgactttgcatgtgcaaacgccttcaacaacagcattattccagaagacaccttcttccccagcccagaaagttcctgtgatgtcaagctggtcgagaaaagctttgaaacagatacgaacctaaactttcaaaacctgtcagtgattgggttccgaatcctcctcctgaaagtggccgggtttaatctgctcatgacgctgcggctgtggtccagc

SEQ ID NO: 1168 - DNA, 801 bp, Homo sapiens
  TCR_58Alpha chain
atgctccttgaacatttattaataatcttgtggatgcagctgacatgggtcagtggtcaacagctgaatcagagtcctcaatctatgtttatccaggaaggagaagatgtctccatgaactgcacttcttcaagcatatttaacacctggctatggtacaagcaggaccctggggaaggtcctgtcctcttgatagccttatataaggctggtgaattgacctcaaatggaagactgactgctcagtttggtataaccagaaaggacagcttcctgaatatctcagcatccatacctagtgatgtaggcatctacttctgtgctgggcagagggatgacatgcgctttggagcagggaccagactgacagtaaaaccaaatatccagaaccctgaccctgccgtgtaccagctgagagactctaaatccagtgacaagtctgtctgcctattcaccgattttgattctcaaacaaatgtgtcacaaagtaaggattctgatgtgtatatcacagacaaaactgtgctagacatgaggtctatggacttcaagagcaacagtgctgtggcctggagcaacaaatctgactttgcatgtgcaaacgccttcaacaacagcattattccagaagacaccttcttccccagcccagaaagttcctgtgatgtcaagctggtcgagaaaagctttgaaacagatacgaacctaaactttcaaaacctgtcagtgattgggttccgaatcctcctcctgaaagtggccgggtttaatctgctcatgacgctgcggctgtggtccagc

SEQ ID NO: 1169 - DNA, 816 bp, Homo sapiens
  TCR_59Alpha chain
atgacatccattcgagctgtatttatattcctgtggctgcagctggacttggtgaatggagagaatgtggagcagcatccttcaaccctgagtgtccaggagggagacagcgctgttatcaagtgtacttattcagacagtgcctcaaactacttcccttggtataagcaagaacttggaaaaggacctcagcttattatagacattcgttcaaatgtgggcgaaaagaaagaccaacgaattgctgttacattgaacaagacagccaaacatttctccctgcacatcacagagacccaacctgaagactcggctgtctacttctgtgcagttagcaccggcactgccagtaaactcacctttgggactggaacaagacttcaggtcacgctcgatatccagaaccctgaccctgccgtgtaccagctgagagactctaaatccagtgacaagtctgtctgcctattcaccgattttgattctcaaacaaatgtgtcacaaagtaaggattctgatgtgtatatcacagacaaaactgtgctagacatgaggtctatggacttcaagagcaacagtgctgtggcctggagcaacaaatctgactttgcatgtgcaaacgccttcaacaacagcattattccagaagacaccttcttccccagcccagaaagttcctgtgatgtcaagctggtcgagaaaagctttgaaacagatacgaacctaaactttcaaaacctgtcagtgattgggttccgaatcctcctcctgaaagtggccgggtttaatctgctcatgacgctgcggctgtggtccagc

SEQ ID NO: 1170 - DNA, 804 bp, Homo sapiens
  TCR_60Alpha chain
atgtggggagttttccttctttatgtttccatgaagatgggaggcactacaggacaaaacattgaccagcccactgagatgacagctacggaaggtgccattgtccagatcaactgcacgtaccagacatctgggttcaacgggctgttctggtaccagcaacatgctggcgaagcacccacatttctgtcttacaatgttctggatggtttggaggagaaaggtcgtttttcttcattccttagtcggtctaaagggtacagttacctccttttgaaggagctccagatgaaagactctgcctcttacctctgtgctgtgagagatctaggcggccagaagctgctctttgcaaggggaaccatgttaaaggtggatcttaatatccagaaccctgaccctgccgtgtaccagctgagagactctaaatccagtgacaagtctgtctgcctattcaccgattttgattctcaaacaaatgtgtcacaaagtaaggattctgatgtgtatatcacagacaaaactgtgctagacatgaggtctatggacttcaagagcaacagtgctgtggcctggagcaacaaatctgactttgcatgtgcaaacgccttcaacaacagcattattccagaagacaccttcttccccagcccagaaagttcctgtgatgtcaagctggtcgagaaaagctttgaaacagatacgaacctaaactttcaaaacctgtcagtgattgggttccgaatcctcctcctgaaagtggccgggtttaatctgctcatgacgctgcggctgtggtccagc

SEQ ID NO: 1171 - DNA, 798 bp, Homo sapiens
  TCR_61Alpha chain
atgaggcaagtggcgagagtgatcgtgttcctgaccctgagtactttgagccttgctaagaccacccagcccatctccatggactcatatgaaggacaagaagtgaacataacctgtagccacaacaacattgctacaaatgattatatcacgtggtaccaacagtttcccagccaaggaccacgatttattattcaaggatacaagacaaaagttacaaacgaagtggcctccctgtttatccctgccgacagaaagtccagcactctgagcctgccccgggtttccctgagcgacactgctgtgtactactgcctcgtggctaacaatgccagactcatgtttggagatggaactcagctggtggtgaagcccaatatccagaaccctgaccctgccgtgtaccagctgagagactctaaatccagtgacaagtctgtctgcctattcaccgattttgattctcaaacaaatgtgtcacaaagtaaggattctgatgtgtatatcacagacaaaactgtgctagacatgaggtctatggacttcaagagcaacagtgctgtggcctggagcaacaaatctgactttgcatgtgcaaacgccttcaacaacagcattattccagaagacaccttcttccccagcccagaaagttcctgtgatgtcaagctggtcgagaaaagctttgaaacagatacgaacctaaactttcaaaacctgtcagtgattgggttccgaatcctcctcctgaaagtggccgggtttaatctgctcatgacgctgcggctgtggtccagc

SEQ ID NO: 1172 - DNA, 816 bp, Homo sapiens
  TCR_62Alpha chain
atgaaatccttgagagttttactagtgatcctgtggcttcagttgagctgggtttggagccaacagaaggaggtggagcagaattctggacccctcagtgttccagagggagccattgcctctctcaactgcacttacagtgaccgaggttcccagtccttcttctggtacagacaatattctgggaaaagccctgagttgataatgttcatatactccaatggtgacaaagaagatggaaggtttacagcacagctcaataaagccagccagtatgtttctctgctcatcagagactcccagcccagtgattcagccacctacctctgtgccgtgaaccaggcaggaactgctctgatctttgggaagggaaccaccttatcagtgagttccaatatccagaaccctgaccctgccgtgtaccagctgagagactctaaatccagtgacaagtctgtctgcctattcaccgattttgattctcaaacaaatgtgtcacaaagtaaggattctgatgtgtatatcacagacaaaactgtgctagacatgaggtctatggacttcaagagcaacagtgctgtggcctggagcaacaaatctgactttgcatgtgcaaacgccttcaacaacagcattattccagaagacaccttcttccccagcccagaaagttcctgtgatgtcaagctggtcgagaaaagctttgaaacagatacgaacctaaactttcaaaacctgtcagtgattgggttccgaatcctcctcctgaaagtggccgggtttaatctgctcatgacgctgcggctgtggtccagc

SEQ ID NO: 1173 - DNA, 819 bp, Homo sapiens
  TCR_63Alpha chain
atgatatccttgagagttttactggtgatcctgtggcttcagttaagctgggtttggagccaacggaaggaggtggagcaggatcctggacccttcaatgttccagagggagccactgtcgctttcaactgtacttacagcaacagtgcttctcagtctttcttctggtacagacaggattgcaggaaagaacctaagttgctgatgtccgtatactccagtggtaatgaagatggaaggtttacagcacagctcaatagagccagccagtatatttccctgctcatcagagactccaagctcagtgattcagccacctacctctgtgtggtgaacatggggcgaggatacagcaccctcacctttgggaaggggactatgcttctagtctctccagatatccagaaccctgaccctgccgtgtaccagctgagagactctaaatccagtgacaagtctgtctgcctattcaccgattttgattctcaaacaaatgtgtcacaaagtaaggattctgatgtgtatatcacagacaaaactgtgctagacatgaggtctatggacttcaagagcaacagtgctgtggcctggagcaacaaatctgactttgcatgtgcaaacgccttcaacaacagcattattccagaagacaccttcttccccagcccagaaagttcctgtgatgtcaagctggtcgagaaaagctttgaaacagatacgaacctaaactttcaaaacctgtcagtgattgggttccgaatcctcctcctgaaagtggccgggtttaatctgctcatgacgctgcggctgtggtccagc

SEQ ID NO: 1174 - DNA, 819 bp, Homo sapiens
  TCR_64Alpha chain
atgctcctgctgctcgtcccagtgctcgaggtgatttttactctgggaggaaccagagcccagtcggtgacccagcttgacagccacgtctctgtctctgaaggaaccccggtgctgctgaggtgcaactactcatcttcttattcaccatctctcttctggtatgtgcaacaccccaacaaaggactccagcttctcctgaagtacacatcagcggccaccctggttaaaggcatcaacggttttgaggctgaatttaggaagagtgaaacctccttccacctgacgaaaccctcagcccatatgagcgacgcggctgagtacttctgtgttgtgaccggggctgggagttaccaactcactttcgggaaggggaccaaactctcggtcataccaaatatccagaaccctgaccctgccgtgtaccagctgagagactctaaatccagtgacaagtctgtctgcctattcaccgattttgattctcaaacaaatgtgtcacaaagtaaggattctgatgtgtatatcacagacaaaactgtgctagacatgaggtctatggacttcaagagcaacagtgctgtggcctggagcaacaaatctgactttgcatgtgcaaacgccttcaacaacagcattattccagaagacaccttcttccccagcccagaaagttcctgtgatgtcaagctggtcgagaaaagctttgaaacagatacgaacctaaactttcaaaacctgtcagtgattgggttccgaatcctcctcctgaaagtggccgggtttaatctgctcatgacgctgcggctgtggtccagc

SEQ ID NO: 1175 - DNA, 816 bp, Homo sapiens
  TCR_65Alpha chain
atgatatccttgagagttttactggtgatcctgtggcttcagttaagctgggtttggagccaacggaaggaggtggagcaggatcctggacccttcaatgttccagagggagccactgtcgctttcaactgtacttacagcaacagtgcttctcagtctttcttctggtacagacaggattgcaggaaagaacctaagttgctgatgtccgtatactccagtggtaatgaagatggaaggtttacagcacagctcaatagagccagccagtatatttccctgctcatcagagactccaagctcagtgattcagccacctacctctgtgtggtgaacagggacaccggtaaccagttctattttgggacagggacaagtttgacggtcattccaaatatccagaaccctgaccctgccgtgtaccagctgagagactctaaatccagtgacaagtctgtctgcctattcaccgattttgattctcaaacaaatgtgtcacaaagtaaggattctgatgtgtatatcacagacaaaactgtgctagacatgaggtctatggacttcaagagcaacagtgctgtggcctggagcaacaaatctgactttgcatgtgcaaacgccttcaacaacagcattattccagaagacaccttcttccccagcccagaaagttcctgtgatgtcaagctggtcgagaaaagctttgaaacagatacgaacctaaactttcaaaacctgtcagtgattgggttccgaatcctcctcctgaaagtggccgggtttaatctgctcatgacgctgcggctgtggtccagc

SEQ ID NO: 1176 - DNA, 810 bp, Homo sapiens
  TCR_66Alpha chain
atgatatccttgagagttttactggtgatcctgtggcttcagttaagctgggtttggagccaacggaaggaggtggagcaggatcctggacccttcaatgttccagagggagccactgtcgctttcaactgtacttacagcaacagtgcttctcagtctttcttctggtacagacaggattgcaggaaagaacctaagttgctgatgtcggtatactccagtggtaatgaagatggaaggtttacagcacagctcaatagagccagccagtatatttccctgctcatcagagactccaagctcagtgattcagccacctacctctgtgtggtgaacagggacaatgacatgcgctttggagcagggaccagactgacagtaaaaccaaatatccagaaccctgaccctgccgtgtaccagctgagagactctaaatccagtgacaagtctgtctgcctattcaccgattttgattctcaaacaaatgtgtcacaaagtaaggattctgatgtgtatatcacagacaaaactgtgctagacatgaggtctatggacttcaagagcaacagtgctgtggcctggagcaacaaatctgactttgcatgtgcaaacgccttcaacaacagcattattccagaagacaccttcttccccagcccagaaagttcctgtgatgtcaagctggtcgagaaaagctttgaaacagatacgaacctaaactttcaaaacctgtcagtgattgggttccgaatcctcctcctgaaagtggccgggtttaatctgctcatgacgctgcggctgtggtccagc

SEQ ID NO: 1177 - DNA, 807 bp, Homo sapiens
  TCR_67Alpha chain
atgaagaggatattgggagctctgctggggctcttgagtgcccaggtttgctgtgtgagaggaatacaagtggagcagagtcctccagacctgattctccaggagggagccaattccacgctgcggtgcaatttttctgactctgtgaacaatttgcagtggtttcatcaaaacccttggggacagctcatcaacctgttttacattccctcagggacaaaacagaatggaagattaagcgccacgactgtcgctacggaacgctacagcttattgtacatttcctcttcccagaccacagactcaggcgtttatttctgtgctgtaaaccaggcaggaactgctctgatctttgggaagggaaccaccttatcagtgagttccaatatccagaaccctgaccctgccgtgtaccagctgagagactctaaatccagtgacaagtctgtctgcctattcaccgattttgattctcaaacaaatgtgtcacaaagtaaggattctgatgtgtatatcacagacaaaactgtgctagacatgaggtctatggacttcaagagcaacagtgctgtggcctggagcaacaaatctgactttgcatgtgcaaacgccttcaacaacagcattattccagaagacaccttcttccccagcccagaaagttcctgtgatgtcaagctggtcgagaaaagctttgaaacagatacgaacctaaactttcaaaacctgtcagtgattgggttccgaatcctcctcctgaaagtggccgggtttaatctgctcatgacgctgcggctgtggtccagc

SEQ ID NO: 1178 - DNA, 813 bp, Homo sapiens
  TCR_68Alpha chain
atgaagacatttgctggattttcgttcctgtttttgtggctgcagctggactgtatgagtagaggagaggatgtggagcagagtcttttcctgagtgtccgagagggagacagctccgttataaactgcacttacacagacagctcctccacctacttatactggtataagcaagaacctggagcaggtctccagttgctgacgtatattttttcaaatatggacatgaaacaagaccaaagactcactgttctattgaataaaaaggataaacatctgtctctgcgcattgcagacacccagactggggactcagctatctacttctgtgcagagagtaaggaaggcaaactaatctttgggcaagggacaactttacaagtaaaaccagatatccagaaccctgaccctgccgtgtaccagctgagagactctaaatccagtgacaagtctgtctgcctattcaccgattttgattctcaaacaaatgtgtcacaaagtaaggattctgatgtgtatatcacagacaaaactgtgctagacatgaggtctatggacttcaagagcaacagtgctgtggcctggagcaacaaatctgactttgcatgtgcaaacgccttcaacaacagcattattccagaagacaccttcttccccagcccagaaagttcctgtgatgtcaagctggtcgagaaaagctttgaaacagatacgaacctaaactttcaaaacctgtcagtgattgggttccgaatcctcctcctgaaagtggccgggtttaatctgctcatgacgctgcggctgtggtccagc

SEQ ID NO: 1179 - DNA, 822 bp, Homo sapiens
  TCR_69Alpha chain
atgaaatccttgagagttttactagtgatcctgtggcttcagttgagctgggtttggagccaacagaaggaggtggagcagaattctggacccctcagtgttccagagggagccattgcctctctcaactgcacttacagtgaccgaggttcccagtccttcttctggtacagacaatattctgggaaaagccctgagttgataatgtccatatactccaatggtgacaaagaagatggaaggtttacagcacagctcaataaagccagccagtatgtttctctgctcatcagagactcccagcccagtgattcagccacctacctctgtgccgtgaacgagggaggaggaagctacatacctacatttggaagaggaaccagccttattgttcatccgtatatccagaaccctgaccctgccgtgtaccagctgagagactctaaatccagtgacaagtctgtctgcctattcaccgattttgattctcaaacaaatgtgtcacaaagtaaggattctgatgtgtatatcacagacaaaactgtgctagacatgaggtctatggacttcaagagcaacagtgctgtggcctggagcaacaaatctgactttgcatgtgcaaacgccttcaacaacagcattattccagaagacaccttcttccccagcccagaaagttcctgtgatgtcaagctggtcgagaaaagctttgaaacagatacgaacctaaactttcaaaacctgtcagtgattgggttccgaatcctcctcctgaaagtggccgggtttaatctgctcatgacgctgcggctgtggtccagc

SEQ ID NO: 1180 - DNA, 813 bp, Homo sapiens
  TCR_70Alpha chain
atggagaaaatgttggagtgtgcattcatagtcttgtggcttcagcttggctggttgagtggagaagaccaggtgacgcagagtcccgaggccctgagactccaggagggagagagtagcagtctcaactgcagttacacagtcagcggtttaagagggctgttctggtataggcaagatcctgggaaaggccctgaattcctcttcaccctgtattcagctggggaagaaaaggagaaagaaaggctaaaagccacattaacaaagaaggaaagctttctgcacatcacagcccctaaacctgaagactcagccacttatctctgtgctgtgcaccttaacgactacaagctcagctttggagccggaaccacagtaactgtaagagcaaatatccagaaccctgaccctgccgtgtaccagctgagagactctaaatccagtgacaagtctgtctgcctattcaccgattttgattctcaaacaaatgtgtcacaaagtaaggattctgatgtgtatatcacagacaaaactgtgctagacatgaggtctatggacttcaagagcaacagtgctgtggcctggagcaacaaatctgactttgcatgtgcaaacgccttcaacaacagcattattccagaagacaccttcttccccagcccagaaagttcctgtgatgtcaagctggtcgagaaaagctttgaaacagatacgaacctaaactttcaaaacctgtcagtgattgggttccgaatcctcctcctgaaagtggccgggtttaatctgctcatgacgctgcggctgtggtccagc

SEQ ID NO: 1181 - DNA, 828 bp, Homo sapiens
  TCR_71Alpha chain
atgctgactgccagcctgttgagggcagtcatagcctccatctgtgttgtatccagcatggctcagaaggtaactcaagcgcagactgaaatttctgtggtggagaaggaggatgtgaccttggactgtgtgtatgaaacccgtgatactacttattacttattctggtacaagcaaccaccaagtggagaattggttttccttattcgtcggaactcttttgatgagcaaaatgaaataagtggtcggtattcttggaacttccagaaatccaccagttccttcaacttcaccatcacagcctcacaagtcgtggactcagcagtatacttctgtgctctgaccggaaatactggaggcttcaaaactatctttggagcaggaacaagactatttgttaaagcaaatatccagaaccctgaccctgccgtgtaccagctgagagactctaaatccagtgacaagtctgtctgcctattcaccgattttgattctcaaacaaatgtgtcacaaagtaaggattctgatgtgtatatcacagacaaaactgtgctagacatgaggtctatggacttcaagagcaacagtgctgtggcctggagcaacaaatctgactttgcatgtgcaaacgccttcaacaacagcattattccagaagacaccttcttccccagcccagaaagttcctgtgatgtcaagctggtcgagaaaagctttgaaacagatacgaacctaaactttcaaaacctgtcagtgattgggttccgaatcctcctcctgaaagtggccgggtttaatctgctcatgacgctgcggctgtggtccagc

SEQ ID NO: 1182 - DNA, 828 bp, Homo sapiens
  TCR_72Alpha chain
atgatgaaatccttgagagttttactggtgatcctgtggcttcagttaagctgggtttggagccaacagaaggaggtggagcaggatcctggaccactcagtgttccagagggagccattgtttctctcaactgcacttacagcaacagtgcttttcaatacttcatgtggtacagacagtattccagaaaaggccctgagttgctgatgtacacatactccagtggtaacaaagaagatggaaggtttacagcacaggtcgataaatccagcaagtatatctccttgttcatcagagactcacagcccagtgattcagccacctacctctgtgcaatgacatggggtggtactagctatggaaagctgacatttggacaagggaccatcttgactgtccatccaaatatccagaaccctgaccctgccgtgtaccagctgagagactctaaatccagtgacaagtctgtctgcctattcaccgattttgattctcaaacaaatgtgtcacaaagtaaggattctgatgtgtatatcacagacaaaactgtgctagacatgaggtctatggacttcaagagcaacagtgctgtggcctggagcaacaaatctgactttgcatgtgcaaacgccttcaacaacagcattattccagaagacaccttcttccccagcccagaaagttcctgtgatgtcaagctggtcgagaaaagctttgaaacagatacgaacctaaactttcaaaacctgtcagtgattgggttccgaatcctcctcctgaaagtggccgggtttaatctgctcatgacgctgcggctgtggtccagc

SEQ ID NO: 1183 - DNA, 825 bp, Homo sapiens
  TCR_73Alpha chain
atggctttgcagagcactctgggggcggtgtggctagggcttctcctcaactctctctggaaggttgcagaaagcaaggaccaagtgtttcagccttccacagtggcatcttcagagggagctgtggtggaaatcttctgtaatcactctgtgtccaatgcttacaacttcttctggtaccttcacttcccgggatgtgcaccaagactccttgttaaaggctcaaagccttctcagcagggacgatacaacatgacctatgaacggttctcttcatcgctgctcatcctccaggtgcgggaggcagatgctgctgtttactactgtgctgtggaggggaattatggaggaagccaaggaaatctcatctttggaaaaggcactaaactctctgttaaaccaaatatccagaaccctgaccctgccgtgtaccagctgagagactctaaatccagtgacaagtctgtctgcctattcaccgattttgattctcaaacaaatgtgtcacaaagtaaggattctgatgtgtatatcacagacaaaactgtgctagacatgaggtctatggacttcaagagcaacagtgctgtggcctggagcaacaaatctgactttgcatgtgcaaacgccttcaacaacagcattattccagaagacaccttcttccccagcccagaaagttcctgtgatgtcaagctggtcgagaaaagctttgaaacagatacgaacctaaactttcaaaacctgtcagtgattgggttccgaatcctcctcctgaaagtggccgggtttaatctgctcatgacgctgcggctgtggtccagc

SEQ ID NO: 1184 - DNA, 813 bp, Homo sapiens
  TCR_74Alpha chain
atgatatccttgagagttttactggtgatcctgtggcttcagttaagctgggtttggagccaacggaaggaggtggagcaggatcctggacccttcaatgttccagagggagccactgtcgctttcaactgtacttacagcaacagtgcttctcagtctttcttctggtacagacaggattgcaggaaagaacctaagttgctgatgtccgtatactccagtggtaatgaagatggaaggtttacagcacagctcaatagagccagccagtatatttccctgctcatcagagactccaagctcagtgattcagccacctacctctgtgtggtgaactacgacaccgacaagctcatctttgggactgggaccagattacaagtctttccaaatatccagaaccctgaccctgccgtgtaccagctgagagactctaaatccagtgacaagtctgtctgcctattcaccgattttgattctcaaacaaatgtgtcacaaagtaaggattctgatgtgtatatcacagacaaaactgtgctagacatgaggtctatggacttcaagagcaacagtgctgtggcctggagcaacaaatctgactttgcatgtgcaaacgccttcaacaacagcattattccagaagacaccttcttccccagcccagaaagttcctgtgatgtcaagctggtcgagaaaagctttgaaacagatacgaacctaaactttcaaaacctgtcagtgattgggttccgaatcctcctcctgaaagtggccgggtttaatctgctcatgacgctgcggctgtggtccagc

SEQ ID NO: 1185 - DNA, 804 bp, Homo sapiens
  TCR_75Alpha chain
atgacatccattcgagctgtatttatattcctgtggctgcagctggacttggtgaatggagagaatgtggagcagcatccttcaaccctgagtgtccaggagggagacagcgctgttatcaagtgtacttattcagacagtgcctcaaactacttcccttggtataagcaagaacttggaaaaggacctcagcttattatagacattcgttcaaatgtgggcgaaaagaaagaccaacgaattgctgttacattgaacaagacagccaaacatttctccctgcacatcacagagacccaacctgaagactcggctgtctacttctgtgcggacgactacaagctcagctttggagccggaaccacagtaactgtaagagcaaatatccagaaccctgaccctgccgtgtaccagctgagagactctaaatccagtgacaagtctgtctgcctattcaccgattttgattctcaaacaaatgtgtcacaaagtaaggattctgatgtgtatatcacagacaaaactgtgctagacatgaggtctatggacttcaagagcaacagtgctgtggcctggagcaacaaatctgactttgcatgtgcaaacgccttcaacaacagcattattccagaagacaccttcttccccagcccagaaagttcctgtgatgtcaagctggtcgagaaaagctttgaaacagatacgaacctaaactttcaaaacctgtcagtgattgggttccgaatcctcctcctgaaagtggccgggtttaatctgctcatgacgctgcggctgtggtccagc

SEQ ID NO: 1186 - DNA, 828 bp, Homo sapiens
  TCR_76Alpha chain
atggagaagaatcctttggcagccccattactaatcctctggtttcatcttgactgcgtgagcagcatactgaacgtggaacaaagtcctcagtcactgcatgttcaggagggagacagcaccaatttcacctgcagcttcccttccagcaatttttatgccttacactggtacagatgggaaactgcaaaaagccccgaggccttgtttgtaatgactttaaatggggatgaaaagaagaaaggacgaataagtgccactcttaataccaaggagggttacagctatttgtacatcaaaggatcccagcctgaagactcagccacatacctctgtgccttcccccgtggaggtagcaactataaactgacatttggaaaaggaactctcttaaccgtgaatccaaatatccagaaccctgaccctgccgtgtaccagctgagagactctaaatccagtgacaagtctgtctgcctattcaccgattttgattctcaaacaaatgtgtcacaaagtaaggattctgatgtgtatatcacagacaaaactgtgctagacatgaggtctatggacttcaagagcaacagtgctgtggcctggagcaacaaatctgactttgcatgtgcaaacgccttcaacaacagcattattccagaagacaccttcttccccagcccagaaagttcctgtgatgtcaagctggtcgagaaaagctttgaaacagatacgaacctaaactttcaaaacctgtcagtgattgggttccgaatcctcctcctgaaagtggccgggtttaatctgctcatgacgctgcggctgtggtccagc

SEQ ID NO: 1187 - DNA, 828 bp, Homo sapiens
  TCR_77Alpha chain
atggagaagaatcctttggcagccccattactaatcctctggtttcatcttgactgcgtgagcagcatactgaacgtggaacaaagtcctcagtcactgcatgttcaggagggagacagcaccaatttcacctgcagcttcccttccagcaatttttatgccttacactggtacagatgggaaactgcaaaaagccccgaggccttgtttgtaatgactttaaatggggatgaaaagaagaaaggacgaataagtgccactcttaataccaaggagggttacagctatttgtacatcaaaggatcccagcctgaagactcagccacatacctctgtgcctttacaaattataaccagggaggaaagcttatcttcggacagggaacggagttatctgtgaaacccaatatccagaaccctgaccctgccgtgtaccagctgagagactctaaatccagtgacaagtctgtctgcctattcaccgattttgattctcaaacaaatgtgtcacaaagtaaggattctgatgtgtatatcacagacaaaactgtgctagacatgaggtctatggacttcaagagcaacagtgctgtggcctggagcaacaaatctgactttgcatgtgcaaacgccttcaacaacagcattattccagaagacaccttcttccccagcccagaaagttcctgtgatgtcaagctggtcgagaaaagctttgaaacagatacgaacctaaactttcaaaacctgtcagtgattgggttccgaatcctcctcctgaaagtggccgggtttaatctgctcatgacgctgcggctgtggtccagc

SEQ ID NO: 1188 - DNA, 810 bp, Homo sapiens
  TCR_78Alpha chain
atgatatccttgagagttttactggtgatcctgtggcttcagttaagctgggtttggagccaacggaaggaggtggagcaggatcctggacccttcaatgttccagagggagccactgtcgctttcaactgtacttacagcaacagtgcttctcagtctttcttctggtacagacaggattgcaggaaagaacctaagttgctgatgtccgtatactccagtggtaatgaagatggaaggtttacagcacagctcaatagagccagccagtatatttccctgctcatcagagactccaagctcagtgattcagccacctacctctgtgtggtgaaccgcggtgacggactcacctttggcaaagggactcatctaatcatccagccctatatccagaaccctgaccctgccgtgtaccagctgagagactctaaatccagtgacaagtctgtctgcctattcaccgattttgattctcaaacaaatgtgtcacaaagtaaggattctgatgtgtatatcacagacaaaactgtgctagacatgaggtctatggacttcaagagcaacagtgctgtggcctggagcaacaaatctgactttgcatgtgcaaacgccttcaacaacagcattattccagaagacaccttcttccccagcccagaaagttcctgtgatgtcaagctggtcgagaaaagctttgaaacagatacgaacctaaactttcaaaacctgtcagtgattgggttccgaatcctcctcctgaaagtggccgggtttaatctgctcatgacgctgcggctgtggtccagc

SEQ ID NO: 1189 - DNA, 813 bp, Homo sapiens
  TCR_79Alpha chain
atgaaatccttgagagttttactagtgatcctgtggcttcagttgagctgggtttggagccaacagaaggaggtggagcagaattctggacccctcagtgttccagagggagccattgcctctctcaactgcacttacagtgaccgagtttcccagtccttcttctggtacagacaatattctgggaaaagccctgagttgataatgtccatatactccaatggtgacaaagaagatggaaggtttacagcacagctcaataaagccagccagtatgtttctctgctcatcagagactcccagcccagtgattcagccacctacctctgtgccgtgaacagagatgacaagatcatctttggaaaagggacacgacttcatattctccccaatatccagaaccctgaccctgccgtgtaccagctgagagactctaaatccagtgacaagtctgtctgcctattcaccgattttgattctcaaacaaatgtgtcacaaagtaaggattctgatgtgtatatcacagacaaaactgtgctagacatgaggtctatggacttcaagagcaacagtgctgtggcctggagcaacaaatctgactttgcatgtgcaaacgccttcaacaacagcattattccagaagacaccttcttccccagcccagaaagttcctgtgatgtcaagctggtcgagaaaagctttgaaacagatacgaacctaaactttcaaaacctgtcagtgattgggttccgaatcctcctcctgaaagtggccgggtttaatctgctcatgacgctgcggctgtggtccagc

SEQ ID NO: 1190 - DNA, 834 bp, Homo sapiens
  TCR_80Alpha chain
atgctgactgccagcctgttgagggcagtcatagcctccatctgtgttgtatccagcatggctcagaaggtaactcaagcgcagactgaaatttctgtggtggagaaggaggatgtgaccttggactgtgtgtatgaaacccgtgatactacttattacttattctggtacaagcaaccaccaagtggagaattggttttccttattcgtcggaactcttttgatgagcaaaatgaaataagtggtcggtattcttggaacttccagaaatccaccagttccttcaacttcaccatcacagcctcacaagtcgtggactcagcagtatacttctgtgctctgagtgagtccgggagtacgggcgactacaagctcagctttggagccggaaccacagtaactgtaagagcaaatatccagaaccctgaccctgccgtgtaccagctgagagactctaaatccagtgacaagtctgtctgcctattcaccgattttgattctcaaacaaatgtgtcacaaagtaaggattctgatgtgtatatcacagacaaaactgtgctagacatgaggtctatggacttcaagagcaacagtgctgtggcctggagcaacaaatctgactttgcatgtgcaaacgccttcaacaacagcattattccagaagacaccttcttccccagcccagaaagttcctgtgatgtcaagctggtcgagaaaagctttgaaacagatacgaacctaaactttcaaaacctgtcagtgattgggttccgaatcctcctcctgaaagtggccgggtttaatctgctcatgacgctgcggctgtggtccagc

SEQ ID NO: 1191 - DNA, 834 bp, Homo sapiens
  TCR_81Alpha chain
atgtcactttctagcctgctgaaggtggtcacagcttcactgtggctaggacctggcattgcccagaagataactcaaacccaaccaggaatgttcgtgcaggaaaaggaggctgtgactctggactgcacatatgacaccagtgatcaaagttatggtctcttctggtacaagcagcccagcagtggggaaatgatttttcttatttatcaggggtcttatgacgagcaaaatgcaacagaaggtcgctactcattgaatttccagaaggcaagaaaatccgccaaccttgtcatctccgcttcacaactgggggactcagcaatgtatttctgtgcaatgagagattcgaactcaaattccgggtatgcactcaacttcggcaaaggcacctcgctgttggtcacaccccatatccagaaccctgaccctgccgtgtaccagctgagagactctaaatccagtgacaagtctgtctgcctattcaccgattttgattctcaaacaaatgtgtcacaaagtaaggattctgatgtgtatatcacagacaaaactgtgctagacatgaggtctatggacttcaagagcaacagtgctgtggcctggagcaacaaatctgactttgcatgtgcaaacgccttcaacaacagcattattccagaagacaccttcttccccagcccagaaagttcctgtgatgtcaagctggtcgagaaaagctttgaaacagatacgaacctaaactttcaaaacctgtcagtgattgggttccgaatcctcctcctgaaagtggccgggtttaatctgctcatgacgctgcggctgtggtccagc

SEQ ID NO: 1192 - DNA, 810 bp, Homo sapiens
  TCR_82Alpha chain
atggaaactctcctgggagtgtctttggtgattctatggcttcaactggctagggtgaacagtcaacagggagaagaggatcctcaggccttgagcatccaggagggtgaaaatgccaccatgaactgcagttacaaaactagtataaacaatttacagtggtatagacaaaattcaggtagaggccttgtccacctaattttaatacgttcaaatgaaagagagaaacacagtggaagattaagagtcacgcttgacacttccaagaaaagcagttccttgttgatcacggcttcccgggcagcagacactgcttcttacttctgtgctacgggcaataacaatgacatgcgctttggagcagggaccagactgacagtaaaaccaaatatccagaaccctgaccctgccgtgtaccagctgagagactctaaatccagtgacaagtctgtctgcctattcaccgattttgattctcaaacaaatgtgtcacaaagtaaggattctgatgtgtatatcacagacaaaactgtgctagacatgaggtctatggacttcaagagcaacagtgctgtggcctggagcaacaaatctgactttgcatgtgcaaacgccttcaacaacagcattattccagaagacaccttcttccccagcccagaaagttcctgtgatgtcaagctggtcgagaaaagctttgaaacagatacgaacctaaactttcaaaacctgtcagtgattgggttccgaatcctcctcctgaaagtggccgggtttaatctgctcatgacgctgcggctgtggtccagc

SEQ ID NO: 1193 - DNA, 846 bp, Homo sapiens
  TCR_83Alpha chain
atggacaagatcttaggagcatcatttttagttctgtggcttcaactatgctgggtgagtggccaacagaaggagaaaagtgaccagcagcaggtgaaacaaagtcctcaatctttgatagtccagaaaggagggatttcaattataaactgtgcttatgagaacactgcgtttgactactttccatggtaccaacaattccctgggaaaggccctgcattattgatagccatacgtccagatgtgagtgaaaagaaagaaggaagattcacaatctccttcaataaaagtgccaagcagttctcattgcatatcatggattcccagcctggagactcagccacctacttctgtgcagcaagtaaccggggcggatctgaaaagctggtctttggaaagggaacgaaactgacagtaaacccatatatccagaaccctgaccctgccgtgtaccagctgagagactctaaatccagtgacaagtctgtctgcctattcaccgattttgattctcaaacaaatgtgtcacaaagtaaggattctgatgtgtatatcacagacaaaactgtgctagacatgaggtctatggacttcaagagcaacagtgctgtggcctggagcaacaaatctgactttgcatgtgcaaacgccttcaacaacagcattattccagaagacaccttcttccccagcccagaaagttcctgtgatgtcaagctggtcgagaaaagctttgaaacagatacgaacctaaactttcaaaacctgtcagtgattgggttccgaatcctcctcctgaaagtggccgggtttaatctgctcatgacgctgcggctgtggtccagc

SEQ ID NO: 1194 - DNA, 822 bp, Homo sapiens
  TCR_84Alpha chain
atggcatgccctggcttcctgtgggcacttgtgatctccacctgtcttgaatttagcatggctcagacagtcactcagtctcaaccagagatgtctgtgcaggaggcagagaccgtgaccctgagctgcacatatgacaccagtgagagtgattattatttattctggtacaagcagcctcccagcaggcagatgattctcgttattcgccaagaagcttataagcaacagaatgcaacagagaatcgtttctctgtgaacttccagaaagcagccaaatccttcagtctcaagatctcagactcacagctgggggatgccgcgatgtatttctgtgcttattccggcactgccagtaaactcacctttgggactggaacaagacttcaggtcacgctcgatatccagaaccctgaccctgccgtgtaccagctgagagactctaaatccagtgacaagtctgtctgcctattcaccgattttgattctcaaacaaatgtgtcacaaagtaaggattctgatgtgtatatcacagacaaaactgtgctagacatgaggtctatggacttcaagagcaacagtgctgtggcctggagcaacaaatctgactttgcatgtgcaaacgccttcaacaacagcattattccagaagacaccttcttccccagcccagaaagttcctgtgatgtcaagctggtcgagaaaagctttgaaacagatacgaacctaaactttcaaaacctgtcagtgattgggttccgaatcctcctcctgaaagtggccgggtttaatctgctcatgacgctgcggctgtggtccagc

SEQ ID NO: 1195 - DNA, 804 bp, Homo sapiens; identical to SEQ ID NO: 1170
  TCR_85Alpha chain

SEQ ID NO: 1196 - DNA, 819 bp, Homo sapiens
  TCR_86Alpha chain
atggagaccctcttgggcctgcttatcctttggctgcagctgcaatgggtgagcagcaaacaggaggtgacacagattcctgcagctctgagtgtcccagaaggagaaaacttggttctcaactgcagtttcactgatagcgctatttacaacctccagtggtttaggcaggaccctgggaaaggtctcacatctctgttgcttattcagtcaagtcagagagagcaaacaagtggaagacttaatgcctcgctggataaatcatcaggacgtagtactttatacattgcagcttctcagcctggtgactcagccacctacctctgtgctgctctttcaggaggaggtgctgacggactcacctttggcaaagggactcatctaatcatccagccctatatccagaaccctgaccctgccgtgtaccagctgagagactctaaatccagtgacaagtctgtctgcctattcaccgattttgattctcaaacaaatgtgtcacaaagtaaggattctgatgtgtatatcacagacaaaactgtgctagacatgaggtctatggacttcaagagcaacagtgctgtggcctggagcaacaaatctgactttgcatgtgcaaacgccttcaacaacagcattattccagaagacaccttcttccccagcccagaaagttcctgtgatgtcaagctggtcgagaaaagctttgaaacagatacgaacctaaactttcaaaacctgtcagtgattgggttccgaatcctcctcctgaaagtggccgggtttaatctgctcatgacgctgcggctgtggtccagc

SEQ ID NO: 1197 - DNA, 810 bp, Homo sapiens
  TCR_87Alpha chain
atgatatccttgagagttttactggtgatcctgtggcttcagttaagctgggtttggagccaacggaaggaggtggagcaggatcctggacccttcaatgttccagagggagccactgtcgctttcaactgtacttacagcaacagtgcttctcagtctttcttctggtacagacaggattgcaggaaagaacctaagttgctgatgtccgtatactccagtggtaatgaagatggaaggtttacagcacagctcaatagagccagccagtatatttccctgctcatcagagactccaagctcagtgattcagccacctacctctgtgtggtgaaccaatacaatgacatgcgctttggagcagggaccagactgacagtaaaaccaaatatccagaaccctgaccctgccgtgtaccagctgagagactctaaatccagtgacaagtctgtctgcctattcaccgattttgattctcaaacaaatgtgtcacaaagtaaggattctgatgtgtatatcacagacaaaactgtgctagacatgaggtctatggacttcaagagcaacagtgctgtggcctggagcaacaaatctgactttgcatgtgcaaacgccttcaacaacagcattattccagaagacaccttcttccccagcccagaaagttcctgtgatgtcaagctggtcgagaaaagctttgaaacagatacgaacctaaactttcaaaacctgtcagtgattgggttccgaatcctcctcctgaaagtggccgggtttaatctgctcatgacgctgcggctgtggtccagc

SEQ ID NO: 1198 - DNA, 825 bp, Homo sapiens
  TCR_88Alpha chain
atgtcactttctagcctgctgaaggtggtcacagcttcactgtggctaggacctggcattgcccagaagataactcaaacccaaccaggaatgttcgtgcaggaaaaggaggctgtgactctggactgcacatatgacaccagtgatccaagttatggtctattctggtacaagcagcccagcagtggggaaatgatttttcttatttatcaggggtcttatgaccagcaaaatgcaacagaaggtcgctactcattgaatttccagaaggcaagaaaatccgccaaccttgtcatctccgcttcacaactgggggactcagcaatgtacttctgtgcaatgagaaggccaggggcaaacaacctcttctttgggactggaacgagactcaccgttattccctatatccagaaccctgaccctgccgtgtaccagctgagagactctaaatccagtgacaagtctgtctgcctattcaccgattttgattctcaaacaaatgtgtcacaaagtaaggattctgatgtgtatatcacagacaaaactgtgctagacatgaggtctatggacttcaagagcaacagtgctgtggcctggagcaacaaatctgactttgcatgtgcaaacgccttcaacaacagcattattccagaagacaccttcttccccagcccagaaagttcctgtgatgtcaagctggtcgagaaaagctttgaaacagatacgaacctaaactttcaaaacctgtcagtgattgggttccgaatcctcctcctgaaagtggccgggtttaatctgctcatgacgctgcggctgtggtccagc

SEQ ID NO: 1199 - DNA, 813 bp, Homo sapiens
  TCR_89Alpha chain
atgacatccattcgagctgtatttatattcctgtggctgcagctggacttggtgaatggagagaatgtggagcagcatccttcaaccctgagtgtccaggagggagacagcgctgttatcaagtgtacttattcagacagtgcctcaaactacttcccttggtataagcaagaacttggaaaaggacctcagcttattatagacattcgttcaaatgtgggcgaaaagaaagaccaacgaattgctgttacattgaacaagacagccaaacatttctccctgcacatcacagagacccaacctgaagactcggctgtctacttctgtgcagcccccacaaataacaatgacatgcgctttggagcagggaccagactgacagtaaaaccaaatatccagaaccctgaccctgccgtgtaccagctgagagactctaaatccagtgacaagtctgtctgcctattcaccgattttgattctcaaacaaatgtgtcacaaagtaaggattctgatgtgtatatcacagacaaaactgtgctagacatgaggtctatggacttcaagagcaacagtgctgtggcctggagcaacaaatctgactttgcatgtgcaaacgccttcaacaacagcattattccagaagacaccttcttccccagcccagaaagttcctgtgatgtcaagctggtcgagaaaagctttgaaacagatacgaacctaaactttcaaaacctgtcagtgattgggttccgaatcctcctcctgaaagtggccgggtttaatctgctcatgacgctgcggctgtggtccagc

SEQ ID NO: 1200 - DNA, 819 bp, Homo sapiens
  TCR_90Alpha chain
atgatatccttgagagttttactggtgatcctgtggcttcagttaagctgggtttggagccaacggaaggaggtggagcaggatcctggacccttcaatgttccagagggagccactgtcgctttcaactgtacttacagcaacagtgcttctcagtctttcttctggtacagacaggattgcaggaaagaacctaagttgctgatgtccgtatactccagtggtaatgaagatggaaggtttacagcacagctcaatagagccagccagtatatttccctgctcatcagagactccaagctcagtgattcagccacctacctctgtgtggtgaacgaccctgctgggagttaccaactcactttcgggaaggggaccaaactctcggtcataccaaatatccagaaccctgaccctgccgtgtaccagctgagagactctaaatccagtgacaagtctgtctgcctattcaccgattttgattctcaaacaaatgtgtcacaaagtaaggattctgatgtgtatatcacagacaaaactgtgctagacatgaggtctatggacttcaagagcaacagtgctgtggcctggagcaacaaatctgactttgcatgtgcaaacgccttcaacaacagcattattccagaagacaccttcttccccagcccagaaagttcctgtgatgtcaagctggtcgagaaaagctttgaaacagatacgaacctaaactttcaaaacctgtcagtgattgggttccgaatcctcctcctgaaagtggccgggtttaatctgctcatgacgctgcggctgtggtccagc

SEQ ID NO: 1201 - DNA, 837 bp, Homo sapiens
  TCR_91Alpha chain
atggccatgctcctgggggcatcagtgctgattctgtggcttcagccagactgggtaaacagtcaacagaagaatgatgaccagcaagttaagcaaaattcaccatccctgagcgtccaggaaggaagaatttctattctgaactgtgactatactaacagcatgtttgattatttcctatggtacaaaaaataccctgctgaaggtcctacattcctgatatctataagttccattaaggataaaaatgaagatggaagattcactgtcttcttaaacaaaagtgccaagcacctctctctgcacattgtgccctcccagcctggagactctgcagtgtacttctgtgcagcccggtattcaggaaacacacctcttgtctttggaaagggcacaagactttctgtgattgcaaatatccagaaccctgaccctgccgtgtaccagctgagagactctaaatccagtgacaagtctgtctgcctattcaccgattttgattctcaaacaaatgtgtcacaaagtaaggattctgatgtgtatatcacagacaaaactgtgctagacatgaggtctatggacttcaagagcaacagtgctgtggcctggagcaacaaatctgactttgcatgtgcaaacgccttcaacaacagcattattccagaagacaccttcttccccagcccagaaagttcctgtgatgtcaagctggtcgagaaaagctttgaaacagatacgaacctaaactttcaaaacctgtcagtgattgggttccgaatcctcctcctgaaagtggccgggtttaatctgctcatgacgctgcggctgtggtccagc

SEQ ID NO: 1202 - DNA, 819 bp, Homo sapiens
  TCR_92Alpha chain
atggagaagaatcctttggcagccccattactaatcctctggtttcatcttgactgcgtgagcagcatactgaacgtggaacaaagtcctcagtcactgcatgttcaggagggagacagcaccaatttcacctgcagcttcccttccagcaatttttatgccttacactggtacagatgggaaactgcaaaaagccccgaggccttgtttgtaatgactttaaatggggatgaaaagaagaaaggacgaataagtgccactcttaataccaaggagggttacagctatttgtacatcaaaggatcccagcctgaagactcagccacatacctctgtgccttagactatggtcagaattttgtctttggtcccggaaccagattgtccgtgctgccctatatccagaaccctgaccctgccgtgtaccagctgagagactctaaatccagtgacaagtctgtctgcctattcaccgattttgattctcaaacaaatgtgtcacaaagtaaggattctgatgtgtatatcacagacaaaactgtgctagacatgaggtctatggacttcaagagcaacagtgctgtggcctggagcaacaaatctgactttgcatgtgcaaacgccttcaacaacagcattattccagaagacaccttcttccccagcccagaaagttcctgtgatgtcaagctggtcgagaaaagctttgaaacagatacgaacctaaactttcaaaacctgtcagtgattgggttccgaatcctcctcctgaaagtggccgggtttaatctgctcatgacgctgcggctgtggtccagc

SEQ ID NO: 1203 - DNA, 816 bp, Homo sapiens
  TCR_93Alpha chain
atgaagacatttgctggattttcgttcctgtttttgtggctgcagctggactgtatgagtagaggagaggatgtggagcagagtcttttcctgagtgtccgagagggagacagctccgttataaactgcacttacacagacagctcctccacctacttatactggtataagcaagaacctggagcaggtctccagttgctgacgtatattttttcaaatatggacatgaaacaagaccaaagactcactgttctattgaataaaaaggataaacatctgtctctgcgcattgcagacacccagactggggactcagctatctacttctgtgcagagagaggtggaggcttcaaaactatctttggagcaggaacaagactatttgttaaagcaaatatccagaaccctgaccctgccgtgtaccagctgagagactctaaatccagtgacaagtctgtctgcctattcaccgattttgattctcaaacaaatgtgtcacaaagtaaggattctgatgtgtatatcacagacaaaactgtgctagacatgaggtctatggacttcaagagcaacagtgctgtggcctggagcaacaaatctgactttgcatgtgcaaacgccttcaacaacagcattattccagaagacaccttcttccccagcccagaaagttcctgtgatgtcaagctggtcgagaaaagctttgaaacagatacgaacctaaactttcaaaacctgtcagtgattgggttccgaatcctcctcctgaaagtggccgggtttaatctgctcatgacgctgcggctgtggtccagc

SEQ ID NO: 1204 - DNA, 834 bp, Homo sapiens
  TCR_94Alpha chain
atgctgactgccagcctgttgagggcagtcatagcctccatctgtgttgtatccagcatggctcagaaggtaactcaagcgcagactgaaatttctgtggtggagaaggaggatgtgaccttggactgtgtgtatgaaacccgtgatactacttattacttattctggtacaagcaaccaccaagtggagaattggttttccttattcgtcggaactcttttgatgagcaaaatgaaataagtggtcggtattcttggaacttccagaaatccaccagttccttcaacttcaccatcacagcctcacaagtcgtggactcagcagtatacttctgtgctctgagcctcatcatttataaccagggaggaaagcttatcttcggacagggaacggagttatctgtgaaacccaatatccagaaccctgaccctgccgtgtaccagctgagagactctaaatccagtgacaagtctgtctgcctattcaccgattttgattctcaaacaaatgtgtcacaaagtaaggattctgatgtgtatatcacagacaaaactgtgctagacatgaggtctatggacttcaagagcaacagtgctgtggcctggagcaacaaatctgactttgcatgtgcaaacgccttcaacaacagcattattccagaagacaccttcttccccagcccagaaagttcctgtgatgtcaagctggtcgagaaaagctttgaaacagatacgaacctaaactttcaaaacctgtcagtgattgggttccgaatcctcctcctgaaagtggccgggtttaatctgctcatgacgctgcggctgtggtccagc

SEQ ID NO: 1205 - DNA, 813 bp, Homo sapiens
  TCR_95Alpha chain
atgatatccttgagagttttactggtgatcctgtggcttcagttaagctgggtttggagccaacggaaggaggtggagcaggatcctggacccttcaatgttccagagggagccactgtcgctttcaactgtacttacagcaacagtgcttctcagtctttcttctggtacagacaggattgcaggaaagaacctaagttgctgatgtccgtatactccagtggtaatgaagatggaaggtttacagcacagctcaatagagccagccagtatatttccctgctcatcagagactccaagctcagtgattcagccacctacctctgtgtggtcaataatgcaggcaacatgctcacctttggagggggaacaaggttaatggtcaaaccccatatccagaaccctgaccctgccgtgtaccagctgagagactctaaatccagtgacaagtctgtctgcctattcaccgattttgattctcaaacaaatgtgtcacaaagtaaggattctgatgtgtatatcacagacaaaactgtgctagacatgaggtctatggacttcaagagcaacagtgctgtggcctggagcaacaaatctgactttgcatgtgcaaacgccttcaacaacagcattattccagaagacaccttcttccccagcccagaaagttcctgtgatgtcaagctggtcgagaaaagctttgaaacagatacgaacctaaactttcaaaacctgtcagtgattgggttccgaatcctcctcctgaaagtggccgggtttaatctgctcatgacgctgcggctgtggtccagc

SEQ ID NO: 1206 - DNA, 810 bp, Homo sapiens
  TCR_96Alpha chain
atgatatccttgagagttttactggtgatcctgtggcttcagttaagctgggtttggagccaacggaaggaggtggagcaggatcctggacccttcaatgttccagagggagccactgtcgctttcaactgtacttacagcaacagtgcttctcagtctttcttctggtacagacaggattgcaggaaagaacctaagttgctgatgtccgtatactccagtggtaatgaagatggaaggtttacagcacagctcaatagagccagccagtatatttccctgctcatcagagactccaagctcagtgattcagccacctacctctgtgtggtgaacgaggaggacaagctcatctttgggactgggaccagattacaagtctttccaaatatccagaaccctgaccctgccgtgtaccagctgagagactctaaatccagtgacaagtctgtctgcctattcaccgattttgattctcaaacaaatgtgtcacaaagtaaggattctgatgtgtatatcacagacaaaactgtgctagacatgaggtctatggacttcaagagcaacagtgctgtggcctggagcaacaaatctgactttgcatgtgcaaacgccttcaacaacagcattattccagaagacaccttcttccccagcccagaaagttcctgtgatgtcaagctggtcgagaaaagctttgaaacagatacgaacctaaactttcaaaacctgtcagtgattgggttccgaatcctcctcctgaaagtggccgggtttaatctgctcatgacgctgcggctgtggtccagc

SEQ ID NO: 1207 - DNA, 807 bp, Homo sapiens
  TCR_97Alpha chain
atgaagcccaccctcatctcagtgcttgtgataatatttatactcagaggaacaagagcccagagagtgactcagcccgagaagctcctctctgtctttaaaggggccccagtggagctgaagtgcaactattcctattctgggagtcctgaactcttctggtatgtccagtactccagacaacgcctccagttactcttgagacacatctctagagagagcatcaaaggcttcactgctgaccttaacaaaggcgagacatctttccacctgaagaaaccatttgctcaagaggaagactcagccatgtattactgtgctctaagctattcagatggccagaagctgctctttgcaaggggaaccatgttaaaggtggatcttaatatccagaaccctgaccctgccgtgtaccagctgagagactctaaatccagtgacaagtctgtctgcctattcaccgattttgattctcaaacaaatgtgtcacaaagtaaggattctgatgtgtatatcacagacaaaactgtgctagacatgaggtctatggacttcaagagcaacagtgctgtggcctggagcaacaaatctgactttgcatgtgcaaacgccttcaacaacagcattattccagaagacaccttcttccccagcccagaaagttcctgtgatgtcaagctggtcgagaaaagctttgaaacagatacgaacctaaactttcaaaacctgtcagtgattgggttccgaatcctcctcctgaaagtggccgggtttaatctgctcatgacgctgcggctgtggtccagc

SEQ ID NO: 1208 - DNA, 822 bp, Homo sapiens
  TCR_98Alpha chain
atgatgaaatccttgagagttttactggtgatcctgtggcttcagttaagctgggtttggagccaacagaaggaggtggagcaggatcctggaccactcagtgttccagagggagccattgtttctctcaactgcacttacagcaacagtgcttttcaatacttcatgtggtacagacagtattccagaaaaggccctgagttgctgatgtacacatactccagtggtaacaaagaagatggaaggtttacagcacaggtcgataaatccagcaagtatatctccttgttcatcagagactcacagcccagtgattcagccacctacctctgtgcaatgagcgctaatgcaggcaacatgctcacctttggagggggaacaaggttaatggtcaaaccccatatccagaaccctgaccctgccgtgtaccagctgagagactctaaatccagtgacaagtctgtctgcctattcaccgattttgattctcaaacaaatgtgtcacaaagtaaggattctgatgtgtatatcacagacaaaactgtgctagacatgaggtctatggacttcaagagcaacagtgctgtggcctggagcaacaaatctgactttgcatgtgcaaacgccttcaacaacagcattattccagaagacaccttcttccccagcccagaaagttcctgtgatgtcaagctggtcgagaaaagctttgaaacagatacgaacctaaactttcaaaacctgtcagtgattgggttccgaatcctcctcctgaaagtggccgggtttaatctgctcatgacgctgcggctgtggtccagc

SEQ ID NO: 1209 - DNA, 810 bp, Homo sapiens
  TCR_99Alpha chain
atgaggcaagtggcgagagtgatcgtgttcctgaccctgagtactttgagccttgctaagaccacccagcccatctccatggactcatatgaaggacaagaagtgaacataacctgtagccacaacaacattgctacaaatgattatatcacgtggtaccaacagtttcccagccaaggaccacgatttattattcaaggatacaagacaaaagttacaaacgaagtggcctccctgtttatccctgccgacagaaagtccagcactctgagcctgccccgggtttccctgagcgacactgctgtgtactactgcctcgtgggtgctgagtctggtggctacaataagctgatttttggagcagggaccaggctggctgtacacccatatatccagaaccctgaccctgccgtgtaccagctgagagactctaaatccagtgacaagtctgtctgcctattcaccgattttgattctcaaacaaatgtgtcacaaagtaaggattctgatgtgtatatcacagacaaaactgtgctagacatgaggtctatggacttcaagagcaacagtgctgtggcctggagcaacaaatctgactttgcatgtgcaaacgccttcaacaacagcattattccagaagacaccttcttccccagcccagaaagttcctgtgatgtcaagctggtcgagaaaagctttgaaacagatacgaacctaaactttcaaaacctgtcagtgattgggttccgaatcctcctcctgaaagtggccgggtttaatctgctcatgacgctgcggctgtggtccagc

SEQ ID NO: 1210 - DNA, 822 bp, Homo sapiens
  TCR_100Alpha chain
atgaagacatttgctggattttcgttcctgtttttgtggctgcagctggactgtatgagtagaggagaggatgtggagcagagtcttttcctgagtgtccgagagggagacagctccgttataaactgcacttacacagacagctcctccacctacttatactggtataagcaagaacctggagcaggtctccagttgctgacgtatattttttcaaatatggacatgaaacaagaccaaagactcactgttctattgaataaaaaggataaacatctgtctctgcgcattgcagacacccagactggggactcagctatctacttctgtgcagagagaactgcgctgggatacagcaccctcacctttgggaaggggactatgcttctagtctctccagatatccagaaccctgaccctgccgtgtaccagctgagagactctaaatccagtgacaagtctgtctgcctattcaccgattttgattctcaaacaaatgtgtcacaaagtaaggattctgatgtgtatatcacagacaaaactgtgctagacatgaggtctatggacttcaagagcaacagtgctgtggcctggagcaacaaatctgactttgcatgtgcaaacgccttcaacaacagcattattccagaagacaccttcttccccagcccagaaagttcctgtgatgtcaagctggtcgagaaaagctttgaaacagatacgaacctaaactttcaaaacctgtcagtgattgggttccgaatcctcctcctgaaagtggccgggtttaatctgctcatgacgctgcggctgtggtccagc

SEQ ID NO: 1211 - DNA, 822 bp, Homo sapiens; identical to SEQ ID NO: 1210
  TCR_101Alpha chain

SEQ ID NO: 1212 - DNA, 810 bp, Homo sapiens
  TCR_102Alpha chain
atgatatccttgagagttttactggtgatcctgtggcttcagttaagctgggtttggagccaacggaaggaggtggagcaggatcctggacccttcaatgttccagagggagccactgtcgctttcaactgtacttacagcaacagtgcttctcagtctttcttctggtacagacaggattgcaggaaagaacctaagttgctgatgtccgtatactccagtggtaatgaagatggaaggtttacagcacagctcaatagagccagccagtatatttccctgctcatcagagactccaagctcagtgattcagccacctacctctgtgtggttaacaataacaatgacatgcgctttggagcagggaccagactgacagtaaaaccaaatatccagaaccctgaccctgccgtgtaccagctgagagactctaaatccagtgacaagtctgtctgcctattcaccgattttgattctcaaacaaatgtgtcacaaagtaaggattctgatgtgtatatcacagacaaaactgtgctagacatgaggtctatggacttcaagagcaacagtgctgtggcctggagcaacaaatctgactttgcatgtgcaaacgccttcaacaacagcattattccagaagacaccttcttccccagcccagaaagttcctgtgatgtcaagctggtcgagaaaagctttgaaacagatacgaacctaaactttcaaaacctgtcagtgattgggttccgaatcctcctcctgaaagtggccgggtttaatctgctcatgacgctgcggctgtggtccagc

SEQ ID NO: 1213 - DNA, 810 bp, Homo sapiens
  TCR_103Alpha chain
atgatatccttgagagttttactggtgatcctgtggcttcagttaagctgggtttggagccaacggaaggaggtggagcaggatcctggacccttcaatgttccagagggagccactgtcgctttcaactgtacttacagcaacagtgcttctcagtctttcttctggtacagacaggattgcaggaaagaacctaagttgctgatgtccgtatactccagtggtaatgaagatggaaggtttacagcacagctcaatagagccagccagtatatttccctgctcatcagagactccaagctcagtgattcagccacctacctctgtgtggtgaacggtaacaatgacatgcgctttggagcagggaccagactgacagtaaaaccaaatatccagaaccctgaccctgccgtgtaccagctgagagactctaaatccagtgacaagtctgtctgcctattcaccgattttgattctcaaacaaatgtgtcacaaagtaaggattctgatgtgtatatcacagacaaaactgtgctagacatgaggtctatggacttcaagagcaacagtgctgtggcctggagcaacaaatctgactttgcatgtgcaaacgccttcaacaacagcattattccagaagacaccttcttccccagcccagaaagttcctgtgatgtcaagctggtcgagaaaagctttgaaacagatacgaacctaaactttcaaaacctgtcagtgattgggttccgaatcctcctcctgaaagtggccgggtttaatctgctcatgacgctgcggctgtggtccagc

SEQ ID NO: 1214 - DNA, 885 bp, Homo sapiens
  TCR_104Alpha chain
atggctttttggctgagaaggctgggtctacatttcaggccacatttggggagacgaatggagtcattcctgggaggtgttttgctgattttgtggcttcaagtggactgggtgaagagccaaaagatagaacagaattccgaggccctgaacattcaggagggtaaaacggccaccctgacctgcaactatacaaactattctccagcatacttacagtggtaccgacaagatccaggaagaggccctgttttcttgctactcatacgtgaaaatgagaaagaaaaaaggaaagaaagactgaaggtcacctttgataccacccttaaacagagtttgtttcatatcacagcctcccagcctgcagactcagctacctacctctgtgctctcccaacctcccggaattcaggaaacacacctcttgtctttggaaagggcacaagactttctgtgattgcaaatatccagaaccctgaccctgccgtgtaccagctgagagactctaaatccagtgacaagtctgtctgcctattcaccgattttgattctcaaacaaatgtgtcacaaagtaaggattctgatgtgtatatcacagacaaaactgtgctagacatgaggtctatggacttcaagagcaacagtgctgtggcctggagcaacaaatctgactttgcatgtgcaaacgccttcaacaacagcattattccagaagacaccttcttccccagcccagaaagttcctgtgatgtcaagctggtcgagaaaagctttgaaacagatacgaacctaaactttcaaaacctgtcagtgattgggttccgaatcctcctcctgaaagtggccgggtttaatctgctcatgacgctgcggctgtggtccagc

SEQ ID NO: 1215 - DNA, 819 bp, Homo sapiens
  TCR_105Alpha chain
atgatgaaatccttgagagttttactggtgatcctgtggcttcagttaagctgggtttggagccaacagaaggaggtggagcaggatcctggaccactcagtgttccagagggagccattgtttctctcaactgcacttacagcaacagtgcttttcaatacttcatgtggtacagacagtattccagaaaaggccctgagttgctgatgtacacatactccagtggtaacaaagaagatggaaggtttacagcacaggtcgataaatccagcaagtatatctccttgttcatcagagactcacagcccagtgattcagccacctacctctgtgcaatccttcagggagcccagaagctggtatttggccaaggaaccaggctgactatcaacccaaatatccagaaccctgaccctgccgtgtaccagctgagagactctaaatccagtgacaagtctgtctgcctattcaccgattttgattctcaaacaaatgtgtcacaaagtaaggattctgatgtgtatatcacagacaaaactgtgctagacatgaggtctatggacttcaagagcaacagtgctgtggcctggagcaacaaatctgactttgcatgtgcaaacgccttcaacaacagcattattccagaagacaccttcttccccagcccagaaagttcctgtgatgtcaagctggtcgagaaaagctttgaaacagatacgaacctaaactttcaaaacctgtcagtgattgggttccgaatcctcctcctgaaagtggccgggtttaatctgctcatgacgctgcggctgtggtccagc

SEQ ID NO: 1216 - DNA, 819 bp, Homo sapiens
  TCR_106Alpha chain
atgaactattctccaggcttagtatctctgatactcttactgcttggaagaacccgtggaaattcagtgacccagatggaagggccagtgactctctcagaagaggccttcctgactataaactgcacgtacacagccacaggatacccttcccttttctggtatgtccaatatcctggagaaggtctacagctcctcctgaaagccacgaaggctgatgacaagggaagcaacaaaggttttgaagccacataccgtaaagaaaccacttctttccacttggagaaaggctcagttcaagtgtcagactcagcggtgtacttctgtgctctgatagggggatctaacgactacaagctcagctttggagccggaaccacagtaactgtaagagcaaatatccagaaccctgaccctgccgtgtaccagctgagagactctaaatccagtgacaagtctgtctgcctattcaccgattttgattctcaaacaaatgtgtcacaaagtaaggattctgatgtgtatatcacagacaaaactgtgctagacatgaggtctatggacttcaagagcaacagtgctgtggcctggagcaacaaatctgactttgcatgtgcaaacgccttcaacaacagcattattccagaagacaccttcttccccagcccagaaagttcctgtgatgtcaagctggtcgagaaaagctttgaaacagatacgaacctaaactttcaaaacctgtcagtgattgggttccgaatcctcctcctgaaagtggccgggtttaatctgctcatgacgctgcggctgtggtccagc

SEQ ID NO: 1217 - DNA, 822 bp, Homo sapiens
  TCR_107Alpha chain
atggagaccctcttgggcctgcttatcctttggctgcagctgcaatgggtgagcagcaaacaggaggtgacgcagattcctgcagctctgagtgtcccagaaggagaaaacttggttctcaactgcagtttcactgatagcgctatttacaacctccagtggtttaggcaggaccctgggaaaggtctcacatctctgttgcttattcagtcaagtcagagagagcaaacaagtggaagacttaatgcctcgctggataaatcatcaggacgtagtactttatacattgcagcttctcagcctggtgactcagccacctacctctgtgctgtgataggaggctctagcaacacaggcaaactaatctttgggcaagggacaactttacaagtaaaaccagatatccagaaccctgaccctgccgtgtaccagctgagagactctaaatccagtgacaagtctgtctgcctattcaccgattttgattctcaaacaaatgtgtcacaaagtaaggattctgatgtgtatatcacagacaaaactgtgctagacatgaggtctatggacttcaagagcaacagtgctgtggcctggagcaacaaatctgactttgcatgtgcaaacgccttcaacaacagcattattccagaagacaccttcttccccagcccagaaagttcctgtgatgtcaagctggtcgagaaaagctttgaaacagatacgaacctaaactttcaaaacctgtcagtgattgggttccgaatcctcctcctgaaagtggccgggtttaatctgctcatgacgctgcggctgtggtccagc

SEQ ID NO: 1218 - DNA, 822 bp, Homo sapiens
  TCR_108Alpha chain
atggagaaaatgttggagtgtgcattcatagtcttgtggcttcagcttggctggttgagtggagaagaccaggtgacgcagagtcccgaggccctgagactccaggagggagagagtagcagtctcaactgcagttacacagtcagcggtttaagagggctgttctggtataggcaagatcctgggaaaggccctgaattcctcttcaccctgtattcagctggggaagaaaaggagaaagaaaggctaaaagccacattaacaaagaaggaaagctttctgcacatcacagcccctaaacctgaagactcagccacttatctctgtgctgccccgatgacaactgacagctgggggaaattgcagtttggagcagggacccaggttgtggtcaccccagatatccagaaccctgaccctgccgtgtaccagctgagagactctaaatccagtgacaagtctgtctgcctattcaccgattttgattctcaaacaaatgtgtcacaaagtaaggattctgatgtgtatatcacagacaaaactgtgctagacatgaggtctatggacttcaagagcaacagtgctgtggcctggagcaacaaatctgactttgcatgtgcaaacgccttcaacaacagcattattccagaagacaccttcttccccagcccagaaagttcctgtgatgtcaagctggtcgagaaaagctttgaaacagatacgaacctaaactttcaaaacctgtcagtgattgggttccgaatcctcctcctgaaagtggccgggtttaatctgctcatgacgctgcggctgtggtccagc

SEQ ID NO: 1219 - DNA, 936 bp, Homo sapiens
  TCR_1Beta chain
atgggcttcaggctcctctgctgtgtggccttttgtctcctgggagcaggcccagtggattctggagtcacacaaaccccaaagcacctgatcacagcaactggacagcgagtgacgctgagatgctcccctaggtctggagacctctctgtgtactggtaccaacagagcctggaccagggcctccagttcctcattcagtattataatggagaagagagagcaaaaggaaacattcttgaacgattctccgcacaacagttccctgacttgcactctgaactaaacctgagctctctggagctgggggactcagctttgtatttctgtgccagcgggggacttatgaggggcctagatacgcagtattttggcccaggcacccggctgacagtgctcgaggacctgaaaaacgtgttcccacccaaggtcgctgtgtttgagccatcagaagcagagatctcccacacccaaaaggccacactggtgtgcctggccacaggcttctaccccgaccacgtggagctgagctggtgggtgaatgggaaggaggtgcacagtggggtcagcacagacccgcagcccctcaaggagcagcccgccctcaatgactccagatactgcctgagcagccgcctgagggtctcggccaccttctggcagaacccccgcaaccacttccgctgtcaagtccagttctacgggctctcggagaatgacgagtggacccaggatagggccaaacctgtcacccagatcgtcagcgccgaggcctggggtagagcagactgtggcttcacctccgagtcttaccagcaaggggtcctgtctgccaccatcctctatgagatcttgctagggaaggccaccttgtatgccgtgctggtcagtgccctcgtgctgatggccatggtcaagagaaaggattccagaggc

SEQ ID NO: 1220 - DNA, 933 bp, Homo sapiens
  TCR_2Beta chain
atgggccctgggctcctctgctgggtgctgctttgtctcctgggagcaggctcagtggagactggagtcacccaaagtcccacacacctgatcaaaacgagaggacagcaagtgactctgagatgctcttctcagtctgggcacaacactgtgtcctggtaccaacaggccctgggtcaggggccccagtttatctttcagtattatagggaggaagagaatggcagaggaaacttccctcctagattctcaggtctccagttccctaattatagctctgagctgaatgtgaacgccttggagctggacgactcggccctgtatctctgtgccagcagcttagacagggaaagcatgaacactgaagctttctttggacaaggcaccagactcacagttgtagaggacctgaacaaggtgttcccacccgaggtcgctgtgtttgagccatcagaagcagagatctcccacacccaaaaggccacactggtgtgcctggccacaggcttcttccctgaccacgtggagctgagctggtgggtgaatgggaaggaggtgcacagtggggtcagcacggacccgcagcccctcaaggagcagcccgccctcaatgactccagatactgcctgagcagccgcctgagggtctcggccaccttctggcagaacccccgcaaccacttccgctgtcaagtccagttctacgggctctcggagaatgacgagtggacccaggatagggccaaacccgtcacccagatcgtcagcgccgaggcctggggtagagcagactgtggctttacctcggtgtcctaccagcaaggggtcctgtctgccaccatcctctatgagatcctgctagggaaggccaccctgtatgctgtgctggtcagcgcccttgtgttgatggccatggtcaagagaaaggatttc

SEQ ID NO: 1221 - DNA, 930 bp, Homo sapiens
  TCR_3Beta chain
atgagcaaccaggtgctctgctgtgtggtcctttgtttcctgggagcaaacaccgtggatggtggaatcactcagtccccaaagtacctgttcagaaaggaaggacagaatgtgaccctgagttgtgaacagaatttgaaccacgatgccatgtactggtaccgacaggacccagggcaagggctgagattgatctactactcacagatagtaaatgactttcagaaaggagatatagctgaagggtacagcgtctctcgggagaagaaggaatcctttcctctcactgtgacatcggcccaaaagaacccgacagctttctatctctgtgccagtagggagctggggcaagagacccagtacttcgggccaggcacgcggctcctggtgctcgaggacctgaaaaacgtgttcccacccaaggtcgctgtgtttgagccatcagaagcagagatctcccacacccaaaaggccacactggtgtgcctggccacaggcttctaccccgaccacgtggagctgagctggtgggtgaatgggaaggaggtgcacagtggggtcagcacagacccgcagcccctcaaggagcagcccgccctcaatgactccagatactgcctgagcagccgcctgagggtctcggccaccttctggcagaacccccgcaaccacttccgctgtcaagtccagttctacgggctctcggagaatgacgagtggacccaggatagggccaaacctgtcacccagatcgtcagcgccgaggcctggggtagagcagactgtggcttcacctccgagtcttaccagcaaggggtcctgtctgccaccatcctctatgagatcttgctagggaaggccaccttgtatgccgtgctggtcagtgccctcgtgctgatggccatggtcaagagaaaggattccagaggc

SEQ ID NO: 1222 - DNA, 948 bp, Homo sapiens
  TCR_4Beta chain
atgggaatcaggctcctctgtcgtgtggccttttgtttcctggctgtaggcctcgtagatgtgaaagtaacccagagctcgagatatctagtcaaaaggacgggagagaaagtttttctggaatgtgtccaggatatggaccatgaaaatatgttctggtatcgacaagacccaggtctggggctacggctgatctatttctcatatgatgttaaaatgaaagaaaaaggagatattcctgaggggtacagtgtctctagagagaagaaggagcgcttctccctgattctggagtccgccagcaccaaccagacatctatgtacctctgtgccagcagtcccctcacgggacagggacttggtggggcctacgagcagtacttcgggccgggcaccaggctcacggtcacagaggacctgaaaaacgtgttcccacccaaggtcgctgtgtttgagccatcagaagcagagatctcccacacccaaaaggccacactggtgtgcctggccacaggcttctaccccgaccacgtggagctgagctggtgggtgaatgggaaggaggtgcacagtggggtcagcacagacccgcagcccctcaaggagcagcccgccctcaatgactccagatactgcctgagcagccgcctgagggtctcggccaccttctggcagaacccccgcaaccacttccgctgtcaagtccagttctacgggctctcggagaatgacgagtggacccaggatagggccaaacctgtcacccagatcgtcagcgccgaggcctggggtagagcagactgtggcttcacctccgagtcttaccagcaaggggtcctgtctgccaccatcctctatgagatcttgctagggaaggccaccttgtatgccgtgctggtcagtgccctcgtgctgatggccatggtcaagagaaaggattccagaggc

SEQ ID NO: 1223 - DNA, 927 bp, Homo sapiens
  TCR_5Beta chain
atgggcaccagcctcctctgctggatggccctgtgtctcctgggggcagatcacgcagatactggagtctcccaggaccccagacacaagatcacaaagaggggacagaatgtaactttcaggtgtgatccaatttctgaacacaaccgcctttattggtaccgacagaccctggggcagggcccagagtttctgacttacttccagaatgaagctcaactagaaaaatcaaggctgctcagtgatcggttctctgcagagaggcctaagggatctttctccaccttggagatccagcgcacagagcagggggactcggccatgtatctctgtgccagcagcgccgacatcgagcagtacttcgggccgggcaccaggctcacggtcacagaggacctgaaaaacgtgttcccacccaaggtcgctgtgtttgagccatcagaagcagagatctcccacacccaaaaggccacactggtgtgcctggccacaggcttctaccccgaccacgtggagctgagctggtgggtgaatgggaaggaggtgcacagtggggtcagcacagacccgcagcccctcaaggagcagcccgccctcaatgactccagatactgcctgagcagccgcctgagggtctcggccaccttctggcagaacccccgcaaccacttccgctgtcaagtccagttctacgggctctcggagaatgacgagtggacccaggatagggccaaacctgtcacccagatcgtcagcgccgaggcctggggtagagcagactgtggcttcacctccgagtcttaccagcaaggggtcctgtctgccaccatcctctatgagatcttgctagggaaggccaccttgtatgccgtgctggtcagtgccctcgtgctgatggccatggtcaagagaaaggattccagaggc

SEQ ID NO: 1224 - DNA, 924 bp, Homo sapiens
  TCR_6Beta chain
atgggaatcaggctcctctgtcgtgtggccttttgtttcctggctgtaggcctcgtagatgtgaaagtaacccagagctcgagatatctagtcaaaaggacgggagagaaagtttttctggaatgtgtccaggatatggaccatgaaaatatgttctggtatcgacaagacccaggtctggggctacggctgatctatttctcatatgatgttaaaatgaaagaaaaaggagatattcctgaggggtacagtgtctctagagagaagaaggagcgcttctccctgattctggagtccgccagcaccaaccagacatctatgtacctctgtgccagcagcacttacaggggtcagccccagcattttggtgatgggactcgactctccatcctagaggacctgaacaaggtgttcccacccgaggtcgctgtgtttgagccatcagaagcagagatctcccacacccaaaaggccacactggtgtgcctggccacaggcttcttccctgaccacgtggagctgagctggtgggtgaatgggaaggaggtgcacagtggggtcagcacggacccgcagcccctcaaggagcagcccgccctcaatgactccagatactgcctgagcagccgcctgagggtctcggccaccttctggcagaacccccgcaaccacttccgctgtcaagtccagttctacgggctctcggagaatgacgagtggacccaggatagggccaaacccgtcacccagatcgtcagcgccgaggcctggggtagagcagactgtggctttacctcggtgtcctaccagcaaggggtcctgtctgccaccatcctctatgagatcctgctagggaaggccaccctgtatgctgtgctggtcagcgcccttgtgttgatggccatggtcaagagaaaggatttc

SEQ ID NO: 1225 - DNA, 936 bp, Homo sapiens
  TCR_7Beta chain
atgggcttcaggctcctctgctgtgtggccttttgtctcctgggagcaggcccagtggattctggagtcacacaaaccccaaagcacctgatcacagcaactggacagcgagtgacgctgagatgctcccctaggtctggagacctctctgtgtactggtaccaacagagcctggaccagggcctccagttcctcattcagtattataatggagaagagagagcaaaaggaaacattcttgaacgattctccgcacaacagttccctgacttgcactctgaactaaacctgagctctctggagctgggggactcagctttgtatttctgtgccagcagcgagggggagagcaacaccggggagctgttttttggagaaggctctaggctgaccgtactggaggacctgaaaaacgtgttcccacccaaggtcgctgtgtttgagccatcagaagcagagatctcccacacccaaaaggccacactggtgtgcctggccacaggcttctaccccgaccacgtggagctgagctggtgggtgaatgggaaggaggtgcacagtggggtcagcacagacccgcagcccctcaaggagcagcccgccctcaatgactccagatactgcctgagcagccgcctgagggtctcggccaccttctggcagaacccccgcaaccacttccgctgtcaagtccagttctacgggctctcggagaatgacgagtggacccaggatagggccaaacctgtcacccagatcgtcagcgccgaggcctggggtagagcagactgtggcttcacctccgagtcttaccagcaaggggtcctgtctgccaccatcctctatgagatcttgctagggaaggccaccttgtatgccgtgctggtcagtgccctcgtgctgatggccatggtcaagagaaaggattccagaggc

SEQ ID NO: 1226 - DNA, 936 bp, Homo sapiens
  TCR_8Beta chain
atgggcttcaggctcctctgctgtgtggccttttgtctcctgggagcaggcccagtggattctggagtcacacaaaccccaaagcacctgatcacagcaactggacagcgagtgacgctgagatgctcccctaggtctggagacctctctgtgtactggtaccaacagagcctggaccagggcctccagttcctcattcagtattataatggagaagagagagcaaaaggaaacattcttgaacgattctccgcacaacagttccctgacttgcactctgaactaaacctgagctctctggagctgggggactcagctttgtatttctgtgccagcagcgccgatgcggggacttcttctgagcagttcttcgggccagggacacggctcaccgtgctagaggacctgaaaaacgtgttcccacccaaggtcgctgtgtttgagccatcagaagcagagatctcccacacccaaaaggccacactggtgtgcctggccacaggcttctaccccgaccacgtggagctgagctggtgggtgaatgggaaggaggtgcacagtggggtcagcacagacccgcagcccctcaaggagcagcccgccctcaatgactccagatactgcctgagcagccgcctgagggtctcggccaccttctggcagaacccccgcaaccacttccgctgtcaagtccagttctacgggctctcggagaatgacgagtggacccaggatagggccaaacctgtcacccagatcgtcagcgccgaggcctggggtagagcagactgtggcttcacctccgagtcttaccagcaaggggtcctgtctgccaccatcctctatgagatcttgctagggaaggccaccttgtatgccgtgctggtcagtgccctcgtgctgatggccatggtcaagagaaaggattccagaggc

SEQ ID NO: 1227 - DNA, 933 bp, Homo sapiens
  TCR_9Beta chain
atgagcaaccaggtgctctgctgtgtggtcctttgtctcctgggagcaaacaccgtggatggtggaatcactcagtccccaaagtacctgttcagaaaggaaggacagaatgtgaccctgagttgtgaacagaatttgaaccacgatgccatgtactggtaccgacaggacccagggcaagggctgagattgatctactactcacagatagtaaatgactttcagaaaggagatatagctgaagggtacagcgtctctcgggagaagaaggaatcctttcctctcactgtgacatcggcccaaaagaacccgacagctttctatctctgtgccagtagtatagtgccaggaagcccttcgcgtggctacaccttcggttcggggaccaggttaaccgttgtagaggacctgaacaaggtgttcccacccgaggtcgctgtgtttgagccatcagaagcagagatctcccacacccaaaaggccacactggtgtgcctggccacaggcttcttccctgaccacgtggagctgagctggtgggtgaatgggaaggaggtgcacagtggggtcagcacggacccgcagcccctcaaggagcagcccgccctcaatgactccagatactgcctgagcagccgcctgagggtctcggccaccttctggcagaacccccgcaaccacttccgctgtcaagtccagttctacgggctctcggagaatgacgagtggacccaggatagggccaaacccgtcacccagatcgtcagcgccgaggcctggggtagagcagactgtggctttacctcggtgtcctaccagcaaggggtcctgtctgccaccatcctctatgagatcctgctagggaaggccaccctgtatgctgtgctggtcagcgcccttgtgttgatggccatggtcaagagaaaggatttc

SEQ ID NO: 1228 - DNA, 939 bp, Homo sapiens
  TCR_10Beta chain
atgggctccaggctgctctgttgggtgctgctttgtctcctgggagcaggcccagtaaaggctggagtcactcaaactccaagatatctgatcaaaacgagaggacagcaagtgacactgagctgctcccctatctctgggcataggagtgtatcctggtaccaacagaccccaggacagggccttcagttcctctttgaatacttcagtgagacacagagaaacaaaggaaacttccctggtcgattctcagggcgccagttctctaactctcgctctgagatgaatgtgagcaccttggagctgggggactcggccctttatctttgcgccagcagcaccgaagacagggtctcctacaatgagcagttcttcgggccagggacacggctcaccgtgctagaggacctgaaaaacgtgttcccacccaaggtcgctgtgtttgagccatcagaagcagagatctcccacacccaaaaggccacactggtgtgcctggccacaggcttctaccccgaccacgtggagctgagctggtgggtgaatgggaaggaggtgcacagtggggtcagcacagacccgcagcccctcaaggagcagcccgccctcaatgactccagatactgcctgagcagccgcctgagggtctcggccaccttctggcagaacccccgcaaccacttccgctgtcaagtccagttctacgggctctcggagaatgacgagtggacccaggatagggccaaacctgtcacccagatcgtcagcgccgaggcctggggtagagcagactgtggcttcacctccgagtcttaccagcaaggggtcctgtctgccaccatcctctatgagatcttgctagggaaggccaccttgtatgccgtgctggtcagtgccctcgtgctgatggccatggtcaagagaaaggattccagaggc

SEQ ID NO: 1229 - DNA, 939 bp, Homo sapiens
  TCR_11Beta chain
atgggcaccaggctcctcttctgggtggccttctgtctcctgggggcagatcacacaggagctggagtctcccagtcccccagtaacaaggtcacagagaagggaaaggatgtagagctcaggtgtgatccaatttcaggtcatactgccctttactggtaccgacagagcctggggcagggcctggagtttttaatttacttccaaggcaacagtgcaccagacaaatcagggctgcccagtgatcgcttctctgcagagaggactgggggatccgtctccactctgacgatccagcgcacacagcaggaggactcggccgtgtatctctgtgccagcagctcaaaggggggagggcaacagacccagtacttcgggccaggcacgcggctcctggtgctcgaggacctgaaaaacgtgttcccacccaaggtcgctgtgtttgagccatcagaagcagagatctcccacacccaaaaggccacactggtgtgcctggccacaggcttctaccccgaccacgtggagctgagctggtgggtgaatgggaaggaggtgcacagtggggtcagcacagacccgcagcccctcaaggagcagcccgccctcaatgactccagatactgcctgagcagccgcctgagggtctcggccaccttctggcagaacccccgcaaccacttccgctgtcaagtccagttctacgggctctcggagaatgacgagtggacccaggatagggccaaacctgtcacccagatcgtcagcgccgaggcctggggtagagcagactgtggcttcacctccgagtcttaccagcaaggggtcctgtctgccaccatcctctatgagatcttgctagggaaggccaccttgtatgccgtgctggtcagtgccctcgtgctgatggccatggtcaagagaaaggattccagaggc

SEQ ID NO: 1230 - DNA, 933 bp, Homo sapiens
  TCR_12Beta chain
atgggcaccaggctcctctgctgggtggtcctgggtttcctagggacagatcacacaggtgctggagtctcccagtcccctaggtacaaagtcgcaaagagaggacaggatgtagctctcaggtgtgatccaatttcgggtcatgtatcccttttttggtaccaacaggccctggggcaggggccagagtttctgacttatttccagaatgaagctcaactagacaaatcggggctgcccagtgatcgcttctttgcagaaaggcctgagggatccgtctccactctgaagatccagcgcacacagcaggaggactccgccgtgtatctctgtgccagcagcgaccgggacagcgtaaactatggctacaccttcggttcggggaccaggttaaccgttgtagaggacctgaacaaggtgttcccacccgaggtcgctgtgtttgagccatcagaagcagagatctcccacacccaaaaggccacactggtgtgcctggccacaggcttcttccctgaccacgtggagctgagctggtgggtgaatgggaaggaggtgcacagtggggtcagcacggacccgcagcccctcaaggagcagcccgccctcaatgactccagatactgcctgagcagccgcctgagggtctcggccaccttctggcagaacccccgcaaccacttccgctgtcaagtccagttctacgggctctcggagaatgacgagtggacccaggatagggccaaacccgtcacccagatcgtcagcgccgaggcctggggtagagcagactgtggctttacctcggtgtcctaccagcaaggggtcctgtctgccaccatcctctatgagatcctgctagggaaggccaccctgtatgctgtgctggtcagcgcccttgtgttgatggccatggtcaagagaaaggatttc

SEQ ID NO: 1231 - DNA, 933 bp, Homo sapiens
  TCR_13Beta chain
atgggcacaaggttgttcttctatgtggccctttgtctcctgtggacaggacacgtggatgctggaatcacccagagcccaagacacaaggtcacagagacaggaacaccagtgactctgagatgtcaccagactgagaaccaccgctacatgtactggtatcgacaagacccggggcatgggctgaggctaatccattactcatatggtgttaaagatactgacaaaggagaagtctcagatggctatagtgtctctagatcaaagacagaggatttcctcctcactctggagtccgctaccagctcccagacatctgtgtacttctgtgccatcagtgaaagggacttccaagagacccagtacttcgggccaggcacgcggctcctggtgctcgaggacctgaaaaacgtgttcccacccaaggtcgctgtgtttgagccatcagaagcagagatctcccacacccaaaaggccacactggtgtgcctggccacaggcttctaccccgaccacgtggagctgagctggtgggtgaatgggaaggaggtgcacagtggggtcagcacagacccgcagcccctcaaggagcagcccgccctcaatgactccagatactgcctgagcagccgcctgagggtctcggccaccttctggcagaacccccgcaaccacttccgctgtcaagtccagttctacgggctctcggagaatgacgagtggacccaggatagggccaaacctgtcacccagatcgtcagcgccgaggcctggggtagagcagactgtggcttcacctccgagtcttaccagcaaggggtcctgtctgccaccatcctctatgagatcttgctagggaaggccaccttgtatgccgtgctggtcagtgccctcgtgctgatggccatggtcaagagaaaggattccagaggc

SEQ ID NO: 1232 - DNA, 936 bp, Homo sapiens
  TCR_14Beta chain
atggccaccaggctcctctgctgtgtggttctttgtctcctgggagaagagcttatagatgctagagtcacccagacaccaaggcacaaggtgacagagatgggacaagaagtaacaatgagatgtcagccaattttaggccacaatactgttttctggtacagacagaccatgatgcaaggactggagttgctggcttacttccgcaaccgggctcctctagatgattcggggatgccgaaggatcgattctcagcagagatgcctgatgcaactttagccactctgaagatccagccctcagaacccagggactcagctgtgtatttttgtgctagtcgggctagcggtgggttcaatgagcagttcttcgggccagggacacggctcaccgtgctagaggacctgaaaaacgtgttcccacccaaggtcgctgtgtttgagccatcagaagcagagatctcccacacccaaaaggccacactggtgtgcctggccacaggcttctaccccgaccacgtggagctgagctggtgggtgaatgggaaggaggtgcacagtggggtcagcacagacccgcagcccctcaaggagcagcccgccctcaatgactccagatactgcctgagcagccgcctgagggtctcggccaccttctggcagaacccccgcaaccacttccgctgtcaagtccagttctacgggctctcggagaatgacgagtggacccaggatagggccaaacctgtcacccagatcgtcagcgccgaggcctggggtagagcagactgtggcttcacctccgagtcttaccagcaaggggtcctgtctgccaccatcctctatgagatcttgctagggaaggccaccttgtatgccgtgctggtcagtgccctcgtgctgatggccatggtcaagagaaaggattccagaggc

SEQ ID NO: 1233 - DNA, 933 bp, Homo sapiens
  TCR_15Beta chain
atgctgctgcttctgctgcttctggggccaggctccgggcttggtgctgtcgtctctcaacatccgagctgggttatctgtaagagtggaacctctgtgaagatcgagtgccgttccctggactttcaggccacaactatgttttggtatcgtcagttcccgaaacagagtctcatgctgatggcaacttccaatgagggctccaaggccacatacgagcaaggcgtcgagaaggacaagtttctcatcaaccatgcaagcctgaccttgtccactctgacagtgaccagtgcccatcctgaagacagcagcttctacatctgcagtgctagagatcgacagggacaaaacaccggggagctgttttttggagaaggctctaggctgaccgtactggaggacctgaaaaacgtgttcccacccaaggtcgctgtgtttgagccatcagaagcagagatctcccacacccaaaaggccacactggtgtgcctggccacaggcttctaccccgaccacgtggagctgagctggtgggtgaatgggaaggaggtgcacagtggggtcagcacagacccgcagcccctcaaggagcagcccgccctcaatgactccagatactgcctgagcagccgcctgagggtctcggccaccttctggcagaacccccgcaaccacttccgctgtcaagtccagttctacgggctctcggagaatgacgagtggacccaggatagggccaaacctgtcacccagatcgtcagcgccgaggcctggggtagagcagactgtggcttcacctccgagtcttaccagcaaggggtcctgtctgccaccatcctctatgagatcttgctagggaaggccaccttgtatgccgtgctggtcagtgccctcgtgctgatggccatggtcaagagaaaggattccagaggc

SEQ ID NO: 1234 - DNA, 936 bp, Homo sapiens
  TCR_16Beta chain
atgggcaccaggctcctctgctgggtggtcctgggtttcctagggacagatcacacaggtgctggagtctcccagtcccctaggtacaaagtcgcaaagagaggacaggatgtagctctcaggtgtgatccaatttcgggtcatgtatcccttttttggtaccaacaggccctggggcaggggccagagtttctgacttatttccagaatgaagctcaactagacaaatcggggctgcccagtgatcgcttctttgcagaaaggcctgagggatccgtctccactctgaagatccagcgcacacagcaggaggactccgccgtgtatctctgtgccagccactcggaccgaaacaccggggagctgttttttggagaaggctctaggctgaccgtactggaggacctgaaaaacgtgttcccacccaaggtcgctgtgtttgagccatcagaagcagagatctcccacacccaaaaggccacactggtgtgcctggccacaggcttctaccccgaccacgtggagctgagctggtgggtgaatgggaaggaggtgcacagtggggtcagcacagacccgcagcccctcaaggagcagcccgccctcaatgactccagatactgcctgagcagccgcctgagggtctcggccaccttctggcagaacccccgcaaccacttccgctgtcaagtccagttctacgggctctcggagaatgacgagtggacccaggatagggccaaacctgtcacccagatcgtcagcgccgaggcctggggtagagcagactgtggcttcacctccgagtcttaccagcaaggggtcctgtctgccaccatcctctatgagatcttgctagggaaggccaccttgtatgccgtgctggtcagtgccctcgtgctgatggccatggtcaagagaaaggattccagaggc

SEQ ID NO: 1235 - DNA, 939 bp, Homo sapiens
  TCR_17Beta chain
atgggcccccagctccttggctatgtggtcctttgccttctaggagcaggccccctggaagcccaagtgacccagaacccaagatacctcatcacagtgactggaaagaagttaacagtgacttgttctcagaatatgaaccatgagtatatgtcctggtatcgacaagacccagggctgggcttaaggcagatctactattcaatgaatgttgaggtgactgataagggagatgttcctgaagggtacaaagtctctcgaaaagagaagaggaatttccccctgatcctggagtcgcccagccccaaccagacctctctgtacttctgtgccagcaatctactgacagggggggacgcagatacgcagtattttggcccaggcacccggctgacagtgctcgaggacctgaaaaacgtgttcccacccaaggtcgctgtgtttgagccatcagaagcagagatctcccacacccaaaaggccacactggtgtgcctggccacaggcttctaccccgaccacgtggagctgagctggtgggtgaatgggaaggaggtgcacagtggggtcagcacagacccgcagcccctcaaggagcagcccgccctcaatgactccagatactgcctgagcagccgcctgagggtctcggccaccttctggcagaacccccgcaaccacttccgctgtcaagtccagttctacgggctctcggagaatgacgagtggacccaggatagggccaaacctgtcacccagatcgtcagcgccgaggcctggggtagagcagactgtggcttcacctccgagtcttaccagcaaggggtcctgtctgccaccatcctctatgagatcttgctagggaaggccaccttgtatgccgtgctggtcagtgccctcgtgctgatggccatggtcaagagaaaggattccagaggc

SEQ ID NO: 1236 - DNA, 924 bp, Homo sapiens
  TCR_18Beta chain
atgggctccaggctgctctgttgggtgctgctttgtctcctgggagcaggcccagtaaaggctggagtcactcaaactccaagatatctgatcaaaacgagaggacagcaagtgacactgagctgctcccctatctctgggcataggagtgtatcctggtaccaacagaccccaggacagggccttcagttcctctttgaatacttcagtgagacacagagaaacaaaggaaacttccctggtcgattctcagggcgccagttctctaactctcgctctgagatgaatgtgagcaccttggagctgggggactcggccctttatctttgcgccagcagcttggcaggggcgcaaggctacaccttcggttcggggaccaggttaaccgttgtagaggacctgaacaaggtgttcccacccgaggtcgctgtgtttgagccatcagaagcagagatctcccacacccaaaaggccacactggtgtgcctggccacaggcttcttccctgaccacgtggagctgagctggtgggtgaatgggaaggaggtgcacagtggggtcagcacggacccgcagcccctcaaggagcagcccgccctcaatgactccagatactgcctgagcagccgcctgagggtctcggccaccttctggcagaacccccgcaaccacttccgctgtcaagtccagttctacgggctctcggagaatgacgagtggacccaggatagggccaaacccgtcacccagatcgtcagcgccgaggcctggggtagagcagactgtggctttacctcggtgtcctaccagcaaggggtcctgtctgccaccatcctctatgagatcctgctagggaaggccaccctgtatgctgtgctggtcagcgcccttgtgttgatggccatggtcaagagaaaggatttc

SEQ ID NO: 1237 - DNA, 933 bp, Homo sapiens
  TCR_19Beta chain
atggatacctggctcgtatgctgggcaatttttagtctcttgaaagcaggactcacagaacctgaagtcacccagactcccagccatcaggtcacacagatgggacaggaagtgatcttgcgctgtgtccccatctctaatcacttatacttctattggtacagacaaatcttggggcagaaagtcgagtttctggtttccttttataataatgaaatctcagagaagtctgaaatattcgatgatcaattctcagttgaaaggcctgatggatcaaatttcactctgaagatccggtccacaaagctggaggactcagccatgtacttctgtgccagcggggggaccaacaccggggagctgttttttggagaaggctctaggctgaccgtactggaggacctgaaaaacgtgttcccacccaaggtcgctgtgtttgagccatcagaagcagagatctcccacacccaaaaggccacactggtgtgcctggccacaggcttctaccccgaccacgtggagctgagctggtgggtgaatgggaaggaggtgcacagtggggtcagcacagacccgcagcccctcaaggagcagcccgccctcaatgactccagatactgcctgagcagccgcctgagggtctcggccaccttctggcagaacccccgcaaccacttccgctgtcaagtccagttctacgggctctcggagaatgacgagtggacccaggatagggccaaacctgtcacccagatcgtcagcgccgaggcctggggtagagcagactgtggcttcacctccgagtcttaccagcaaggggtcctgtctgccaccatcctctatgagatcttgctagggaaggccaccttgtatgccgtgctggtcagtgccctcgtgctgatggccatggtcaagagaaaggattccagaggc

SEQ ID NO: 1238 - DNA, 933 bp, Homo sapiens
  TCR_20Beta chain
atgggcttcaggctcctctgctgtgtggccttttgtctcctgggagcaggcccagtggattctggagtcacacaaaccccaaagcacctgatcacagcaactggacagcgagtgacgctgagatgctcccctaggtctggagacctctctgtgtactggtaccaacagagcctggaccagggcctccagttcctcattcagtattataatggagaagagagagcaaaaggaaacattcttgaacgattctccgcacaacagttccctgacttgcactctgaactaaacctgagctctctggagctgggggactcagctttgtatttctgtgccagcagcgtagcgggagggctttatgagcagttcttcgggccagggacacggctcaccgtgctagaggacctgaaaaacgtgttcccacccaaggtcgctgtgtttgagccatcagaagcagagatctcccacacccaaaaggccacactggtgtgcctggccacaggcttctaccccgaccacgtggagctgagctggtgggtgaatgggaaggaggtgcacagtggggtcagcacagacccgcagcccctcaaggagcagcccgccctcaatgactccagatactgcctgagcagccgcctgagggtctcggccaccttctggcagaacccccgcaaccacttccgctgtcaagtccagttctacgggctctcggagaatgacgagtggacccaggatagggccaaacctgtcacccagatcgtcagcgccgaggcctggggtagagcagactgtggcttcacctccgagtcttaccagcaaggggtcctgtctgccaccatcctctatgagatcttgctagggaaggccaccttgtatgccgtgctggtcagtgccctcgtgctgatggccatggtcaagagaaaggattccagaggc

SEQ ID NO: 1239 - DNA, 930 bp, Homo sapiens
  TCR_21Beta chain
atgggcccccagctccttggctatgtggtcctttgccttctaggagcaggccccctggaagcccaagtgacccagaacccaagatacctcatcacagtgactggaaagaagttaacagtgacttgttctcagaatatgaaccatgagtatatgtcctggtatcgacaagacccagggctgggcttaaggcagatctactattcaatgaatgttgaggtgactgataagggagatgttcctgaagggtacaaagtctctcgaaaagagaagaggaatttccccctgatcctggagtcgcccagccccaaccagacctctctgtacttctgtgccagcagccctgccctagggcgcgagcagtacttcgggccgggcaccaggctcacggtcacagaggacctgaaaaacgtgttcccacccaaggtcgctgtgtttgagccatcagaagcagagatctcccacacccaaaaggccacactggtgtgcctggccacaggcttctaccccgaccacgtggagctgagctggtgggtgaatgggaaggaggtgcacagtggggtcagcacagacccgcagcccctcaaggagcagcccgccctcaatgactccagatactgcctgagcagccgcctgagggtctcggccaccttctggcagaacccccgcaaccacttccgctgtcaagtccagttctacgggctctcggagaatgacgagtggacccaggatagggccaaacctgtcacccagatcgtcagcgccgaggcctggggtagagcagactgtggcttcacctccgagtcttaccagcaaggggtcctgtctgccaccatcctctatgagatcttgctagggaaggccaccttgtatgccgtgctggtcagtgccctcgtgctgatggccatggtcaagagaaaggattccagaggc

SEQ ID NO: 1240 - DNA, 927 bp, Homo sapiens
  TCR_22Beta chain
atgagcaccaggcttctctgctggatggccctctgtctcctgggggcagaactctcagaagctgaagttgcccagtcccccagatataagattacagagaaaagccaggctgtggctttttggtgtgatcctatttctggccatgctaccctttactggtaccggcagatcctgggacagggcccggagcttctggttcaatttcaggatgagagtgtagtagatgattcacagttgcctaaggatcgattttctgcagagaggctcaaaggagtagactccactctcaagatccagcctgcagagcttggggactcggccatgtatctctgtgccagcagctttggggggagcactgaagctttctttggacaaggcaccagactcacagttgtagaggacctgaacaaggtgttcccacccgaggtcgctgtgtttgagccatcagaagcagagatctcccacacccaaaaggccacactggtgtgcctggccacaggcttcttccctgaccacgtggagctgagctggtgggtgaatgggaaggaggtgcacagtggggtcagcacggacccgcagcccctcaaggagcagcccgccctcaatgactccagatactgcctgagcagccgcctgagggtctcggccaccttctggcagaacccccgcaaccacttccgctgtcaagtccagttctacgggctctcggagaatgacgagtggacccaggatagggccaaacccgtcacccagatcgtcagcgccgaggcctggggtagagcagactgtggctttacctcggtgtcctaccagcaaggggtcctgtctgccaccatcctctatgagatcctgctagggaaggccaccctgtatgctgtgctggtcagcgcccttgtgttgatggccatggtcaagagaaaggatttc

SEQ ID NO: 1241 - DNA, 921 bp, Homo sapiens
  TCR_23Beta chain
atggcctccctgctcttcttctgtggggccttttatctcctgggaacagggtccatggatgctgatgttacccagaccccaaggaataggatcacaaagacaggaaagaggattatgctggaatgttctcagactaagggtcatgatagaatgtactggtatcgacaagacccaggactgggcctacggttgatctattactcctttgatgtcaaagatataaacaaaggagagatctctgatggatacagtgtctctcgacaggcacaggctaaattctccctgtccctagagtctgccatccccaaccagacagctctttacttctgtgccaccagtgatgacagtgaaaaactgttttttggcagtggaacccagctctctgtcttggaggacctgaacaaggtgttcccacccgaggtcgctgtgtttgagccatcagaagcagagatctcccacacccaaaaggccacactggtgtgcctggccacaggcttcttccctgaccacgtggagctgagctggtgggtgaatgggaaggaggtgcacagtggggtcagcacggacccgcagcccctcaaggagcagcccgccctcaatgactccagatactgcctgagcagccgcctgagggtctcggccaccttctggcagaacccccgcaaccacttccgctgtcaagtccagttctacgggctctcggagaatgacgagtggacccaggatagggccaaacccgtcacccagatcgtcagcgccgaggcctggggtagagcagactgtggctttacctcggtgtcctaccagcaaggggtcctgtctgccaccatcctctatgagatcctgctagggaaggccaccctgtatgctgtgctggtcagcgcccttgtgttgatggccatggtcaagagaaaggatttc

SEQ ID NO: 1242 - DNA, 936 bp, Homo sapiens
  TCR_24Beta chain
atgggcccccagctccttggctatgtggtcctttgccttctaggagcaggccccctggaagcccaagtgacccagaacccaagatacctcatcacagtgactggaaagaagttaacagtgacttgttctcagaatatgaaccatgagtatatgtcctggtatcgacaagacccagggctgggcttaaggcagatctactattcaatgaatgttgaggtgactgataagggagatgttcctgaagggtacaaagtctctcgaaaagagaagaggaatttccccctgatcctggagtcgcccagccccaaccagacctctctgtacttctgtgccagcagtttggggacagctagcacagatacgcagtattttggcccaggcacccggctgacagtgctcgaggacctgaaaaacgtgttcccacccaaggtcgctgtgtttgagccatcagaagcagagatctcccacacccaaaaggccacactggtgtgcctggccacaggcttctaccccgaccacgtggagctgagctggtgggtgaatgggaaggaggtgcacagtggggtcagcacagacccgcagcccctcaaggagcagcccgccctcaatgactccagatactgcctgagcagccgcctgagggtctcggccaccttctggcagaacccccgcaaccacttccgctgtcaagtccagttctacgggctctcggagaatgacgagtggacccaggatagggccaaacctgtcacccagatcgtcagcgccgaggcctggggtagagcagactgtggcttcacctccgagtcttaccagcaaggggtcctgtctgccaccatcctctatgagatcttgctagggaaggccaccttgtatgccgtgctggtcagtgccctcgtgctgatggccatggtcaagagaaaggattccagaggc

SEQ ID NO: 1243 - DNA, 927 bp, Homo sapiens
  TCR_25Beta chain
atgctgagtcttctgctccttctcctgggactaggctctgtgttcagtgctgtcatctctcaaaagccaagcagggatatctgtcaacgtggaacctccctgacgatccagtgtcaagtcgatagccaagtcaccatgatgttctggtaccgtcagcaacctggacagagcctgacactgatcgcaactgcaaatcagggctctgaggccacatatgagagtggatttgtcattgacaagtttcccatcagccgcccaaacctaacattctcaactctgactgtgagcaacatgagccctgaagacagcagcatatatctctgcagcgttgatcgagaccgtaacaccggggagctgttttttggagaaggctctaggctgaccgtactggaggacctgaaaaacgtgttcccacccaaggtcgctgtgtttgagccatcagaagcagagatctcccacacccaaaaggccacactggtgtgcctggccacaggcttctaccccgaccacgtggagctgagctggtgggtgaatgggaaggaggtgcacagtggggtcagcacagacccgcagcccctcaaggagcagcccgccctcaatgactccagatactgcctgagcagccgcctgagggtctcggccaccttctggcagaacccccgcaaccacttccgctgtcaagtccagttctacgggctctcggagaatgacgagtggacccaggatagggccaaacctgtcacccagatcgtcagcgccgaggcctggggtagagcagactgtggcttcacctccgagtcttaccagcaaggggtcctgtctgccaccatcctctatgagatcttgctagggaaggccaccttgtatgccgtgctggtcagtgccctcgtgctgatggccatggtcaagagaaaggattccagaggc

SEQ ID NO: 1244 - DNA, 948 bp, Homo sapiens
  TCR_26Beta chain
atgggaatcaggctcctctgtcgtgtggccttttgtttcctggctgtaggcctcgtagatgtgaaagtaacccagagctcgagatatctagtcaaaaggacgggagagaaagtttttctggaatgtgtccaggatatggaccatgaaaatatgttctggtatcgacaagacccaggtctggggctacggctgatctatttctcatatgatgttaaaatgaaagaaaaaggagatattcctgaggggtacagtgtctctagagagaagaaggagcgcttctccctgattctggagtccgccagcaccaaccagacatctatgtacctctgtgccagcagtccgataaaagacacccgacaggagtacaccggggagctgttttttggagaaggctctaggctgaccgtactggaggacctgaaaaacgtgttcccacccaaggtcgctgtgtttgagccatcagaagcagagatctcccacacccaaaaggccacactggtgtgcctggccacaggcttctaccccgaccacgtggagctgagctggtgggtgaatgggaaggaggtgcacagtggggtcagcacagacccgcagcccctcaaggagcagcccgccctcaatgactccagatactgcctgagcagccgcctgagggtctcggccaccttctggcagaacccccgcaaccacttccgctgtcaagtccagttctacgggctctcggagaatgacgagtggacccaggatagggccaaacctgtcacccagatcgtcagcgccgaggcctggggtagagcagactgtggcttcacctccgagtcttaccagcaaggggtcctgtctgccaccatcctctatgagatcttgctagggaaggccaccttgtatgccgtgctggtcagtgccctcgtgctgatggccatggtcaagagaaaggattccagaggc

SEQ ID NO: 1245 - DNA, 939 bp, Homo sapiens
  TCR_27Beta chain
atgggctccaggctgctctgttgggtgctgctttgtctcctgggagcaggcccagtaaaggctggagtcactcaaactccaagatatctgatcaaaacgagaggacagcaagtgacactgagctgctcccctatctctgggcataggagtgtatcctggtaccaacagaccccaggacagggccttcagttcctctttgaatacttcagtgagacacagagaaacaaaggaaacttccctggtcgattctcagggcgccagttctctaactctcgctctgagatgaatgtgagcaccttggagctgggggactcggccctttatctttgcgccagcagcctaattggagcggggagcacagatacgcagtattttggcccaggcacccggctgacagtgctcgaggacctgaaaaacgtgttcccacccaaggtcgctgtgtttgagccatcagaagcagagatctcccacacccaaaaggccacactggtgtgcctggccacaggcttctaccccgaccacgtggagctgagctggtgggtgaatgggaaggaggtgcacagtggggtcagcacagacccgcagcccctcaaggagcagcccgccctcaatgactccagatactgcctgagcagccgcctgagggtctcggccaccttctggcagaacccccgcaaccacttccgctgtcaagtccagttctacgggctctcggagaatgacgagtggacccaggatagggccaaacctgtcacccagatcgtcagcgccgaggcctggggtagagcagactgtggcttcacctccgagtcttaccagcaaggggtcctgtctgccaccatcctctatgagatcttgctagggaaggccaccttgtatgccgtgctggtcagtgccctcgtgctgatggccatggtcaagagaaaggattccagaggc

SEQ ID NO: 1246 - DNA, 930 bp, Homo sapiens
  TCR_28Beta chain
atgggcaccaggctcctctgctgggcggccctctgtctcctgggagcagaactcacagaagctggagttgcccagtctcccagatataagattatagagaaaaggcagagtgtggctttttggtgcaatcctatatctggccatgctaccctttactggtaccagcagatcctgggacagggcccaaagcttctgattcagtttcagaataacggtgtagtggatgattcacagttgcctaaggatcgattttctgcagagaggctcaaaggagtagactccactctcaagatccagcctgcaaagcttgaggactcggccgtgtatctctgtgccagcagcttagggacagggggcactgaagctttctttggacaaggcaccagactcacagttgtagaggacctgaacaaggtgttcccacccgaggtcgctgtgtttgagccatcagaagcagagatctcccacacccaaaaggccacactggtgtgcctggccacaggcttcttccctgaccacgtggagctgagctggtgggtgaatgggaaggaggtgcacagtggggtcagcacggacccgcagcccctcaaggagcagcccgccctcaatgactccagatactgcctgagcagccgcctgagggtctcggccaccttctggcagaacccccgcaaccacttccgctgtcaagtccagttctacgggctctcggagaatgacgagtggacccaggatagggccaaacccgtcacccagatcgtcagcgccgaggcctggggtagagcagactgtggctttacctcggtgtcctaccagcaaggggtcctgtctgccaccatcctctatgagatcctgctagggaaggccaccctgtatgctgtgctggtcagcgcccttgtgttgatggccatggtcaagagaaaggatttc

SEQ ID NO: 1247 - DNA, 933 bp, Homo sapiens
  TCR_29Beta chain
atgctgctgcttctgctgcttctggggccaggctccgggcttggtgctgtcgtctctcaacatccgagcagggttatctgtaagagtggaacctctgtgaagatcgagtgccgttccctggactttcaggccacaactatgttttggtatcgtcagttcccgaaacagagtctcatgctgatggcaacttccaatgagggctccaaggccacatacgagcaaggcgtcgagaaggacaagtttctcatcaaccatgcaagcctgaccttgtccactctgacagtgaccagtgcccatcctgaagacagcagcttctacatctgcagtgctagagatcaggcctctcaaaacaccggggagctgttttttggagaaggctctaggctgaccgtactggaggacctgaaaaacgtgttcccacccaaggtcgctgtgtttgagccatcagaagcagagatctcccacacccaaaaggccacactggtgtgcctggccacaggcttctaccccgaccacgtggagctgagctggtgggtgaatgggaaggaggtgcacagtggggtcagcacagacccgcagcccctcaaggagcagcccgccctcaatgactccagatactgcctgagcagccgcctgagggtctcggccaccttctggcagaacccccgcaaccacttccgctgtcaagtccagttctacgggctctcggagaatgacgagtggacccaggatagggccaaacctgtcacccagatcgtcagcgccgaggcctggggtagagcagactgtggcttcacctccgagtcttaccagcaaggggtcctgtctgccaccatcctctatgagatcttgctagggaaggccaccttgtatgccgtgctggtcagtgccctcgtgctgatggccatggtcaagagaaaggattccagaggc

SEQ ID NO: 1248 - DNA, 933 bp, Homo sapiens
  TCR_30Beta chain
atgagcatcagcctcctgtgctgtgcagcctttcctctcctgtgggcaggtccagtgaatgctggtgtcactcagaccccaaaattccgcatcctgaagataggacagagcatgacactgcagtgtacccaggatatgaaccataactacatgtactggtatcgacaagacccaggcatggggctgaagctgatttattattcagttggtgctggtatcactgataaaggagaagtcccgaatggctacaacgtctccagatcaaccacagaggatttcccgctcaggctggagttggctgctccctcccagacatctgtgtacttctgtgccagcagccccggggcttcctacaatgagcagttcttcgggccagggacacggctcaccgtgctagaggacctgaaaaacgtgttcccacccaaggtcgctgtgtttgagccatcagaagcagagatctcccacacccaaaaggccacactggtgtgcctggccacaggcttctaccccgaccacgtggagctgagctggtgggtgaatgggaaggaggtgcacagtggggtcagcacagacccgcagcccctcaaggagcagcccgccctcaatgactccagatactgcctgagcagccgcctgagggtctcggccaccttctggcagaacccccgcaaccacttccgctgtcaagtccagttctacgggctctcggagaatgacgagtggacccaggatagggccaaacctgtcacccagatcgtcagcgccgaggcctggggtagagcagactgtggcttcacctccgagtcttaccagcaaggggtcctgtctgccaccatcctctatgagatcttgctagggaaggccaccttgtatgccgtgctggtcagtgccctcgtgctgatggccatggtcaagagaaaggattccagaggc

SEQ ID NO: 1249 - DNA, 939 bp, Homo sapiens
  TCR_31Beta chain
atgggcttcaggctcctctgctgtgtggccttttgtctcctgggagcaggcccagtggattctggagtcacacaaaccccaaagcacctgatcacagcaactggacagcgagtgacgctgagatgctcccctaggtctggagacctctctgtgtactggtaccaacagagcctggaccagggcctccagttcctcattcagtattataatggagaagagagagcaaaaggaaacattcttgaacgattctccgcacaacagttccctgacttgcactctgaactaaacctgagctctctggagctgggggactcagctttgtatttctgtgccagcagcgtagaggtccaggcccgctcggatacgcagtattttggcccaggcacccggctgacagtgctcgaggacctgaaaaacgtgttcccacccaaggtcgctgtgtttgagccatcagaagcagagatctcccacacccaaaaggccacactggtgtgcctggccacaggcttctaccccgaccacgtggagctgagctggtgggtgaatgggaaggaggtgcacagtggggtcagcacagacccgcagcccctcaaggagcagcccgccctcaatgactccagatactgcctgagcagccgcctgagggtctcggccaccttctggcagaacccccgcaaccacttccgctgtcaagtccagttctacgggctctcggagaatgacgagtggacccaggatagggccaaacctgtcacccagatcgtcagcgccgaggcctggggtagagcagactgtggcttcacctccgagtcttaccagcaaggggtcctgtctgccaccatcctctatgagatcttgctagggaaggccaccttgtatgccgtgctggtcagtgccctcgtgctgatggccatggtcaagagaaaggattccagaggc

SEQ ID NO: 1250 - DNA, 927 bp, Homo sapiens
  TCR_32Beta chain
atgggcttcaggctcctctgctgtgtggccttttgtctcctgggagcaggcccagtggattctggagtcacacaaaccccaaagcacctgatcacagcaactggacagcgagtgacgctgagatgctcccctaggtctggagacctctctgtgtactggtaccaacagagcctggaccagggcctccagttcctcattcagtattataatggagaagagagagcaaaaggaaacattcttgaacgattctccgcacaacagttccctgacttgcactctgaactaaacctgagctctctggagctgggggactcagctttgtatttctgtgccagcagcgacggacagggaggctatggctacaccttcggttcggggaccaggttaaccgttgtagaggacctgaacaaggtgttcccacccgaggtcgctgtgtttgagccatcagaagcagagatctcccacacccaaaaggccacactggtgtgcctggccacaggcttcttccctgaccacgtggagctgagctggtgggtgaatgggaaggaggtgcacagtggggtcagcacggacccgcagcccctcaaggagcagcccgccctcaatgactccagatactgcctgagcagccgcctgagggtctcggccaccttctggcagaacccccgcaaccacttccgctgtcaagtccagttctacgggctctcggagaatgacgagtggacccaggatagggccaaacccgtcacccagatcgtcagcgccgaggcctggggtagagcagactgtggctttacctcggtgtcctaccagcaaggggtcctgtctgccaccatcctctatgagatcctgctagggaaggccaccctgtatgctgtgctggtcagcgcccttgtgttgatggccatggtcaagagaaaggatttc

SEQ ID NO: 1251 - DNA, 930 bp, Homo sapiens
  TCR_33Beta chain
atgactatcaggctcctctgctacgtgggcttttattttctgggggcaggcctcatggaagctgacatctaccagaccccaagataccttgttatagggacaggaaagaagatcactctggaatgttctcaaaccatgggccatgacaaaatgtactggtatcaacaagatccaggaatggaactacacctcatccactattcctatggagttaattccacagagaagggagatctttcctctgagtcaacagtctccagaataaggacggagcattttcccctgaccctggagtctgccaggccctcacatacctctcagtacctctgtgccagcagcagactagagagcctcggaaacaccatatattttggagagggaagttggctcactgttgtagaggacctgaacaaggtgttcccacccgaggtcgctgtgtttgagccatcagaagcagagatctcccacacccaaaaggccacactggtgtgcctggccacaggcttcttccctgaccacgtggagctgagctggtgggtgaatgggaaggaggtgcacagtggggtcagcacggacccgcagcccctcaaggagcagcccgccctcaatgactccagatactgcctgagcagccgcctgagggtctcggccaccttctggcagaacccccgcaaccacttccgctgtcaagtccagttctacgggctctcggagaatgacgagtggacccaggatagggccaaacccgtcacccagatcgtcagcgccgaggcctggggtagagcagactgtggctttacctcggtgtcctaccagcaaggggtcctgtctgccaccatcctctatgagatcctgctagggaaggccaccctgtatgctgtgctggtcagcgcccttgtgttgatggccatggtcaagagaaaggatttc

SEQ ID NO: 1252 - DNA, 936 bp, Homo sapiens
  TCR_34Beta chain
atgggctccaggctgctctgttgggtgctgctttgtctcctgggagcaggcccagtaaaggctggagtcactcaaactccaagatatctgatcaaaacgagaggacagcaagtgacactgagctgctcccctatctctgggcataggagtgtatcctggtaccaacagaccccaggacagggccttcagttcctctttgaatacttcagtgagacacagagaaacaaaggaaacttccctggtcgattctcagggcgccagttctctaactctcgctctgagatgaatgtgagcaccttggagctgggggactcggccctttatctttgcgccagcagccacgggacaaccacctacaatgagcagttcttcgggccagggacacggctcaccgtgctagaggacctgaaaaacgtgttcccacccaaggtcgctgtgtttgagccatcagaagcagagatctcccacacccaaaaggccacactggtgtgcctggccacaggcttctaccccgaccacgtggagctgagctggtgggtgaatgggaaggaggtgcacagtggggtcagcacagacccgcagcccctcaaggagcagcccgccctcaatgactccagatactgcctgagcagccgcctgagggtctcggccaccttctggcagaacccccgcaaccacttccgctgtcaagtccagttctacgggctctcggagaatgacgagtggacccaggatagggccaaacctgtcacccagatcgtcagcgccgaggcctggggtagagcagactgtggcttcacctccgagtcttaccagcaaggggtcctgtctgccaccatcctctatgagatcttgctagggaaggccaccttgtatgccgtgctggtcagtgccctcgtgctgatggccatggtcaagagaaaggattccagaggc

SEQ ID NO: 1253 - DNA, 933 bp, Homo sapiens
  TCR_35Beta chain
atgctgctgcttctgctgcttctggggccaggctccgggcttggtgctgtcgtctctcaacatccgagctgggttatctgtaagagtggaacctctgtgaagatcgagtgccgttccctggactttcaggccacaactatgttttggtatcgtcagttcccgaaacagagtctcatgctgatggcaacttccaatgagggctccaaggccacatacgagcaaggcgtcgagaaggacaagtttctcatcaaccatgcaagcctgaccttgtccactctgacagtgaccagtgcccatcctgaagacagcagcttctacatctgcagtgctagagatattgggacaggcgcccactacgagcagtacttcgggccgggcaccaggctcacggtcacagaggacctgaaaaacgtgttcccacccaaggtcgctgtgtttgagccatcagaagcagagatctcccacacccaaaaggccacactggtgtgcctggccacaggcttctaccccgaccacgtggagctgagctggtgggtgaatgggaaggaggtgcacagtggggtcagcacagacccgcagcccctcaaggagcagcccgccctcaatgactccagatactgcctgagcagccgcctgagggtctcggccaccttctggcagaacccccgcaaccacttccgctgtcaagtccagttctacgggctctcggagaatgacgagtggacccaggatagggccaaacctgtcacccagatcgtcagcgccgaggcctggggtagagcagactgtggcttcacctccgagtcttaccagcaaggggtcctgtctgccaccatcctctatgagatcttgctagggaaggccaccttgtatgccgtgctggtcagtgccctcgtgctgatggccatggtcaagagaaaggattccagaggc

SEQ ID NO: 1254 - DNA, 936 bp, Homo sapiens
  TCR_36Beta chain
atgggctccaggctgctctgttgggtgctgctttgtctcctgggagcaggcccagtaaaggctggagtcactcaaactccaagatatctgatcaaaacgagaggacagcaagtgacactgagctgctcccctatctctgggcataggagtgtatcctggtaccaacagaccccaggacagggccttcagttcctctttgaatacttcagtgagacacagagaaacaaaggaaacttccctggtcgattctcagggcgccagttctctaactctcgctctgagatgaatgtgagcaccttggagctgggggactcggccctttatctttgcgccagcagtaggacaggggggtcctacaatgagcagttcttcgggccagggacacggctcaccgtgctagaggacctgaaaaacgtgttcccacccaaggtcgctgtgtttgagccatcagaagcagagatctcccacacccaaaaggccacactggtgtgcctggccacaggcttctaccccgaccacgtggagctgagctggtgggtgaatgggaaggaggtgcacagtggggtcagcacagacccgcagcccctcaaggagcagcccgccctcaatgactccagatactgcctgagcagccgcctgagggtctcggccaccttctggcagaacccccgcaaccacttccgctgtcaagtccagttctacgggctctcggagaatgacgagtggacccaggatagggccaaacctgtcacccagatcgtcagcgccgaggcctggggtagagcagactgtggcttcacctccgagtcttaccagcaaggggtcctgtctgccaccatcctctatgagatcttgctagggaaggccaccttgtatgccgtgctggtcagtgccctcgtgctgatggccatggtcaagagaaaggattccagaggc

SEQ ID NO: 1255 - DNA, 948 bp, Homo sapiens
  TCR_37Beta chain
atgggcacaaggttgttcttctatgtggccctttgtctcctgtggacaggacacatggatgctggaatcacccagagcccaagacacaaggtcacagagacaggaacaccagtgactctgagatgtcatcagactgagaaccaccgctatatgtactggtatcgacaagacccggggcatgggctgaggctgatccattactcatatggtgttaaagatactgacaaaggagaagtctcagatggctatagtgtctctagatcaaagacagaggatttcctcctcactctggagtccgctaccagctcccagacatctgtgtacttctgtgccatcagtgagtcgtggactagcgggatcggcagggaagagacccagtacttcgggccaggcacgcggctcctggtgctcgaggacctgaaaaacgtgttcccacccaaggtcgctgtgtttgagccatcagaagcagagatctcccacacccaaaaggccacactggtgtgcctggccacaggcttctaccccgaccacgtggagctgagctggtgggtgaatgggaaggaggtgcacagtggggtcagcacagacccgcagcccctcaaggagcagcccgccctcaatgactccagatactgcctgagcagccgcctgagggtctcggccaccttctggcagaacccccgcaaccacttccgctgtcaagtccagttctacgggctctcggagaatgacgagtggacccaggatagggccaaacctgtcacccagatcgtcagcgccgaggcctggggtagagcagactgtggcttcacctccgagtcttaccagcaaggggtcctgtctgccaccatcctctatgagatcttgctagggaaggccaccttgtatgccgtgctggtcagtgccctcgtgctgatggccatggtcaagagaaaggattccagaggc

SEQ ID NO: 1256 - DNA, 936 bp, Homo sapiens
  TCR_38Beta chain
atgggctgcaggctgctctgctgtgcggttctctgtctcctgggagcagttcccatagacactgaagttacccagacaccaaaacacctggtcatgggaatgacaaataagaagtctttgaaatgtgaacaacatatggggcacagggctatgtattggtacaagcagaaagctaagaagccaccggagctcatgtttgtctacagctatgagaaactctctataaatgaaagtgtgccaagtcgcttctcacctgaatgccccaacagctctctcttaaaccttcacctacacgccctgcagccagaagactcagccctgtatctctgcgccagcagccaagattcagggacagggagtaaaaacaccatatattttggagagggaagttggctcactgttgtagaggacctgaacaaggtgttcccacccgaggtcgctgtgtttgagccatcagaagcagagatctcccacacccaaaaggccacactggtgtgcctggccacaggcttcttccctgaccacgtggagctgagctggtgggtgaatgggaaggaggtgcacagtggggtcagcacggacccgcagcccctcaaggagcagcccgccctcaatgactccagatactgcctgagcagccgcctgagggtctcggccaccttctggcagaacccccgcaaccacttccgctgtcaagtccagttctacgggctctcggagaatgacgagtggacccaggatagggccaaacccgtcacccagatcgtcagcgccgaggcctggggtagagcagactgtggctttacctcggtgtcctaccagcaaggggtcctgtctgccaccatcctctatgagatcctgctagggaaggccaccctgtatgctgtgctggtcagcgcccttgtgttgatggccatggtcaagagaaaggatttc

SEQ ID NO: 1257 - DNA, 942 bp, Homo sapiens
  TCR_39Beta chain
atgggcaccagtctcctatgctgggtggtcctgggtttcctagggacagatcacacaggtgctggagtctcccagtctcccaggtacaaagtcacaaagaggggacaggatgtagctctcaggtgtgatccaatttcgggtcatgtatccctttattggtaccgacaggccctggggcagggcccagagtttctgacttacttcaattatgaagcccaacaagacaaatcagggctgcccaatgatcggttctctgcagagaggcctgagggatccatctccactctgacgatccagcgcacagagcagcgggactcggccatgtatcgctgtgccagcagcttaggcccgggacagggctacaatgagcagttcttcgggccagggacacggctcaccgtgctagaggacctgaaaaacgtgttcccacccaaggtcgctgtgtttgagccatcagaagcagagatctcccacacccaaaaggccacactggtgtgcctggccacaggcttctaccccgaccacgtggagctgagctggtgggtgaatgggaaggaggtgcacagtggggtcagcacagacccgcagcccctcaaggagcagcccgccctcaatgactccagatactgcctgagcagccgcctgagggtctcggccaccttctggcagaacccccgcaaccacttccgctgtcaagtccagttctacgggctctcggagaatgacgagtggacccaggatagggccaaacctgtcacccagatcgtcagcgccgaggcctggggtagagcagactgtggcttcacctccgagtcttaccagcaaggggtcctgtctgccaccatcctctatgagatcttgctagggaaggccaccttgtatgccgtgctggtcagtgccctcgtgctgatggccatggtcaagagaaaggattccagaggc

SEQ ID NO: 1258 - DNA, 936 bp, Homo sapiens
  TCR_40Beta chain
atgggccctgggctcctctgctgggtgctgctttgtctcctgggagcaggctcagtggagactggagtcacccaaagtcccacacacctgatcaaaacgagaggacagcaagtgactctgagatgctcttctcagtctgggcacaacactgtgtcctggtaccaacaggccctgggtcaggggccccagtttatctttcagtattatagggaggaagagaatggcagaggaaacttccctcctagattctcaggtctccagttccctaattatagctctgagctgaatgtgaacgccttggagctggacgactcggccctgtatctctgtgccagcagctcctcagccctagaagaccccgagcagtacttcgggccgggcaccaggctcacggtcacagaggacctgaaaaacgtgttcccacccaaggtcgctgtgtttgagccatcagaagcagagatctcccacacccaaaaggccacactggtgtgcctggccacaggcttctaccccgaccacgtggagctgagctggtgggtgaatgggaaggaggtgcacagtggggtcagcacagacccgcagcccctcaaggagcagcccgccctcaatgactccagatactgcctgagcagccgcctgagggtctcggccaccttctggcagaacccccgcaaccacttccgctgtcaagtccagttctacgggctctcggagaatgacgagtggacccaggatagggccaaacctgtcacccagatcgtcagcgccgaggcctggggtagagcagactgtggcttcacctccgagtcttaccagcaaggggtcctgtctgccaccatcctctatgagatcttgctagggaaggccaccttgtatgccgtgctggtcagtgccctcgtgctgatggccatggtcaagagaaaggattccagaggc

SEQ ID NO: 1259 - DNA, 942 bp, Homo sapiens
  TCR_41Beta chain
atgggccctgggctcctctgctgggtgctgctttgtctcctgggagcaggctcagtggagactggagtcacccaaagtcccacacacctgatcaaaacgagaggacagcaagtgactctgagatgctcttctcagtctgggcacaacactgtgtcctggtaccaacaggccctgggtcaggggccccagtttatctttcagtattatagggaggaagagaatggcagaggaaacttccctcctagattctcaggtctccagttccctaattatagctctgagctgaatgtgaacgccttggagctggacgactcggccctgtatctctgtgccagcagcgacttggcacagtatctgaacaccggggagctgttttttggagaaggctctaggctgaccgtactggaggacctgaaaaacgtgttcccacccaaggtcgctgtgtttgagccatcagaagcagagatctcccacacccaaaaggccacactggtgtgcctggccacaggcttctaccccgaccacgtggagctgagctggtgggtgaatgggaaggaggtgcacagtggggtcagcacagacccgcagcccctcaaggagcagcccgccctcaatgactccagatactgcctgagcagccgcctgagggtctcggccaccttctggcagaacccccgcaaccacttccgctgtcaagtccagttctacgggctctcggagaatgacgagtggacccaggatagggccaaacctgtcacccagatcgtcagcgccgaggcctggggtagagcagactgtggcttcacctccgagtcttaccagcaaggggtcctgtctgccaccatcctctatgagatcttgctagggaaggccaccttgtatgccgtgctggtcagtgccctcgtgctgatggccatggtcaagagaaaggattccagaggc

SEQ ID NO: 1260 - DNA, 930 bp, Homo sapiens
  TCR_42Beta chain
atgagcctcgggctcctgtgctgtggggccttttctctcctgtgggcaggtccagtgaatgctggtgtcactcagaccccaaaattccgggtcctgaagacaggacagagcatgacactgctgtgtgcccaggatatgaaccatgaatacatgtactggtatcgacaagacccaggcatggggctgaggctgattcattactcagttggtgagggtacaactgccaaaggagaggtccctgatggctacaatgtctccagattaaaaaaacagaatttcctgctggggttggagtcggctgctccctcccaaacatctgtgtacttctgtgccagccaagatattaacaccggggagctgttttttggagaaggctctaggctgaccgtactggaggacctgaaaaacgtgttcccacccaaggtcgctgtgtttgagccatcagaagcagagatctcccacacccaaaaggccacactggtgtgcctggccacaggcttctaccccgaccacgtggagctgagctggtgggtgaatgggaaggaggtgcacagtggggtcagcacagacccgcagcccctcaaggagcagcccgccctcaatgactccagatactgcctgagcagccgcctgagggtctcggccaccttctggcagaacccccgcaaccacttccgctgtcaagtccagttctacgggctctcggagaatgacgagtggacccaggatagggccaaacctgtcacccagatcgtcagcgccgaggcctggggtagagcagactgtggcttcacctccgagtcttaccagcaaggggtcctgtctgccaccatcctctatgagatcttgctagggaaggccaccttgtatgccgtgctggtcagtgccctcgtgctgatggccatggtcaagagaaaggattccagaggc

SEQ ID NO: 1261 - DNA, 939 bp, Homo sapiens
  TCR_43Beta chain
atgagcctcgggctcctgtgctgtggggccttttctctcctgtgggcaggtccagtgaatgctggtgtcactcagaccccaaaattccgggtcctgaagacaggacagagcatgacactgctgtgtgcccaggatatgaaccatgaatacatgtactggtatcgacaagacccaggcatggggctgaggctgattcattactcagttggtgagggtacaactgccaaaggagaggtccctgatggctacaatgtctccagattaaaaaaacagaatttcctgctggggttggagtcggctgctccctcccaaacatctgtgtacttctgtgccagcagcagtatgactagcgggattcggtacgagcagtacttcgggccgggcaccaggctcacggtcacagaggacctgaaaaacgtgttcccacccaaggtcgctgtgtttgagccatcagaagcagagatctcccacacccaaaaggccacactggtgtgcctggccacaggcttctaccccgaccacgtggagctgagctggtgggtgaatgggaaggaggtgcacagtggggtcagcacagacccgcagcccctcaaggagcagcccgccctcaatgactccagatactgcctgagcagccgcctgagggtctcggccaccttctggcagaacccccgcaaccacttccgctgtcaagtccagttctacgggctctcggagaatgacgagtggacccaggatagggccaaacctgtcacccagatcgtcagcgccgaggcctggggtagagcagactgtggcttcacctccgagtcttaccagcaaggggtcctgtctgccaccatcctctatgagatcttgctagggaaggccaccttgtatgccgtgctggtcagtgccctcgtgctgatggccatggtcaagagaaaggattccagaggc

SEQ ID NO: 1262 - DNA, 969 bp, Homo sapiens
  TCR_44Beta chain
atgcttagtcctgacctgcctgactctgcctggaacaccaggctcctctgccgtgtcatgctttgtctcctgggagcaggttcagtggctgctggagtcatccagtccccaagacatctgatcaaagaaaagagggaaacagccactctgaaatgctatcctatccctagacacgacactgtctactggtaccagcagggtccaggtcaggacccccagttcctcatttcgttttatgaaaagatgcagagcgataaaggaagcatccctgatcgattctcagctcaacagttcagtgactatcattctgaactgaacatgagctccttggagctgggggactcagccctgtacttctgtgccagcagcttatatgaggacagggccaactgggagcagtacttcgggccgggcaccaggctcacggtcacagaggacctgaaaaacgtgttcccacccaaggtcgctgtgtttgagccatcagaagcagagatctcccacacccaaaaggccacactggtgtgcctggccacaggcttctaccccgaccacgtggagctgagctggtgggtgaatgggaaggaggtgcacagtggggtcagcacagacccgcagcccctcaaggagcagcccgccctcaatgactccagatactgcctgagcagccgcctgagggtctcggccaccttctggcagaacccccgcaaccacttccgctgtcaagtccagttctacgggctctcggagaatgacgagtggacccaggatagggccaaacctgtcacccagatcgtcagcgccgaggcctggggtagagcagactgtggcttcacctccgagtcttaccagcaaggggtcctgtctgccaccatcctctatgagatcttgctagggaaggccaccttgtatgccgtgctggtcagtgccctcgtgctgatggccatggtcaagagaaaggattccagaggc

SEQ ID NO: 1263 - DNA, 933 bp, Homo sapiens
  TCR_45Beta chain
atgctgctgcttctgctgcttctggggccaggctccgggcttggtgctgtcgtctctcaacatccgagcagggttatctgtaagagtggaacctctgtgaagatcgagtgccgttccctggactttcaggccacaactatgttttggtatcgtcagttcccgaaacagagtctcatgctgatggcaacttccaatgagggctccaaggccacatacgagcaaggcgtcgagaaggacaagtttctcatcaaccatgcaagcctgaccttgtccactctgacagtgaccagtgcccatcctgaagacagcagcttctacatctgcagtgcccaatcgcaactcagggttttggaggagacccagtacttcgggccaggcacgcggctcctggtgctcgaggacctgaaaaacgtgttcccacccaaggtcgctgtgtttgagccatcagaagcagagatctcccacacccaaaaggccacactggtgtgcctggccacaggcttctaccccgaccacgtggagctgagctggtgggtgaatgggaaggaggtgcacagtggggtcagcacagacccgcagcccctcaaggagcagcccgccctcaatgactccagatactgcctgagcagccgcctgagggtctcggccaccttctggcagaacccccgcaaccacttccgctgtcaagtccagttctacgggctctcggagaatgacgagtggacccaggatagggccaaacctgtcacccagatcgtcagcgccgaggcctggggtagagcagactgtggcttcacctccgagtcttaccagcaaggggtcctgtctgccaccatcctctatgagatcttgctagggaaggccaccttgtatgccgtgctggtcagtgccctcgtgctgatggccatggtcaagagaaaggattccagaggc

SEQ ID NO: 1264 - DNA, 933 bp, Homo sapiens
  TCR_46Beta chain
atgagcatcgggctcctgtgctgtgtggccttttctctcctgtgggcaagtccagtgaatgctggtgtcactcagaccccaaaattccaggtcctgaagacaggacagagcatgacactgcagtgtgcccaggatatgaaccataactccatgtactggtatcgacaagacccaggcatgggactgaggctgatttattactcagcttctgagggtaccactgacaaaggagaagtccccaatggctacaatgtctccagattaaacaaacgggagttctcgctcaggctggagtcggctgctccctcccagacatctgtgtacttctgtgccagccggagttgggtccgggcccctaatcagccccagcattttggtgatgggactcgactctccatcctagaggacctgaacaaggtgttcccacccgaggtcgctgtgtttgagccatcagaagcagagatctcccacacccaaaaggccacactggtgtgcctggccacaggcttcttccctgaccacgtggagctgagctggtgggtgaatgggaaggaggtgcacagtggggtcagcacggacccgcagcccctcaaggagcagcccgccctcaatgactccagatactgcctgagcagccgcctgagggtctcggccaccttctggcagaacccccgcaaccacttccgctgtcaagtccagttctacgggctctcggagaatgacgagtggacccaggatagggccaaacccgtcacccagatcgtcagcgccgaggcctggggtagagcagactgtggctttacctcggtgtcctaccagcaaggggtcctgtctgccaccatcctctatgagatcctgctagggaaggccaccctgtatgctgtgctggtcagcgcccttgtgttgatggccatggtcaagagaaaggatttc

SEQ ID NO: 1265 - DNA, 936 bp, Homo sapiens
  TCR_47Beta chain
atgagcatcgggctcctgtgctgtgtggccttttctctcctgtgggcaagtccagtgaatgctggtgtcactcagaccccaaaattccaggtcctgaagacaggacagagcatgacactgcagtgtgcccaggatatgaaccataactccatgtactggtatcgacaagacccaggcatgggactgaggctgatttattactcagcttctgagggtaccactgacaaaggagaagtccccaatggctacaatgtctccagattaaacaaacgggagttctcgctcaggctggagtcggctgctccctcccagacatctgtgtacttctgtgccagcagctacctttacagggtcgccggggagctgttttttggagaaggctctaggctgaccgtactggaggacctgaaaaacgtgttcccacccaaggtcgctgtgtttgagccatcagaagcagagatctcccacacccaaaaggccacactggtgtgcctggccacaggcttctaccccgaccacgtggagctgagctggtgggtgaatgggaaggaggtgcacagtggggtcagcacagacccgcagcccctcaaggagcagcccgccctcaatgactccagatactgcctgagcagccgcctgagggtctcggccaccttctggcagaacccccgcaaccacttccgctgtcaagtccagttctacgggctctcggagaatgacgagtggacccaggatagggccaaacctgtcacccagatcgtcagcgccgaggcctggggtagagcagactgtggcttcacctccgagtcttaccagcaaggggtcctgtctgccaccatcctctatgagatcttgctagggaaggccaccttgtatgccgtgctggtcagtgccctcgtgctgatggccatggtcaagagaaaggattccagaggc

SEQ ID NO: 1266 - DNA, 939 bp, Homo sapiens
  TCR_48Beta chain
atggatacctggctcgtatgctgggcaatttttagtctcttgaaagcaggactcacagaacctgaagtcacccagactcccagccatcaggtcacacagatgggacaggaagtgatcttgcgctgtgtccccatctctaatcacttatacttctattggtacagacaaatcttggggcagaaagtcgagtttctggtttccttttataataatgaaatctcagagaagtctgaaatattcgatgatcaattctcagttgaaaggcctgatggatcaaatttcactctgaagatccggtccacaaagctggaggactcagccatgtacttctgtgccagcaaaacagggggcgcagccaaaaacattcagtacttcggcgccgggacccggctctcagtgctggaggacctgaaaaacgtgttcccacccaaggtcgctgtgtttgagccatcagaagcagagatctcccacacccaaaaggccacactggtgtgcctggccacaggcttctaccccgaccacgtggagctgagctggtgggtgaatgggaaggaggtgcacagtggggtcagcacagacccgcagcccctcaaggagcagcccgccctcaatgactccagatactgcctgagcagccgcctgagggtctcggccaccttctggcagaacccccgcaaccacttccgctgtcaagtccagttctacgggctctcggagaatgacgagtggacccaggatagggccaaacctgtcacccagatcgtcagcgccgaggcctggggtagagcagactgtggcttcacctccgagtcttaccagcaaggggtcctgtctgccaccatcctctatgagatcttgctagggaaggccaccttgtatgccgtgctggtcagtgccctcgtgctgatggccatggtcaagagaaaggattccagaggc

SEQ ID NO: 1267 - DNA, 927 bp, Homo sapiens
  TCR_49Beta chain
atgggcccccagctccttggctatgtggtcctttgccttctaggagcaggccccctggaagcccaagtgacccagaacccaagatacctcatcacagtgactggaaagaagttaacagtgacttgttctcagaatatgaaccatgagtatatgtcctggtatcgacaagacccagggctgggcttaaggcagatctactattcaatgaatgttgaggtgactgataagggagatgttcctgaagggtacaaagtctctcgaaaagagaagaggaatttccccctgatcctggagtcgcccagccccaaccagacctctctgtacttctgtgccagcagtttacaggggactggctatggctacaccttcggttcggggaccaggttaaccgttgtagaggacctgaacaaggtgttcccacccgaggtcgctgtgtttgagccatcagaagcagagatctcccacacccaaaaggccacactggtgtgcctggccacaggcttcttccctgaccacgtggagctgagctggtgggtgaatgggaaggaggtgcacagtggggtcagcacggacccgcagcccctcaaggagcagcccgccctcaatgactccagatactgcctgagcagccgcctgagggtctcggccaccttctggcagaacccccgcaaccacttccgctgtcaagtccagttctacgggctctcggagaatgacgagtggacccaggatagggccaaacccgtcacccagatcgtcagcgccgaggcctggggtagagcagactgtggctttacctcggtgtcctaccagcaaggggtcctgtctgccaccatcctctatgagatcctgctagggaaggccaccctgtatgctgtgctggtcagcgcccttgtgttgatggccatggtcaagagaaaggatttc

SEQ ID NO: 1268 - DNA, 933 bp, Homo sapiens
  TCR_50Beta chain
atgggaatcaggctcctctgtcgtgtggccttttgtttcctggctgtaggcctcgtagatgtgaaagtaacccagagctcgagatatctagtcaaaaggacgggagagaaagtttttctggaatgtgtccaggatatggaccatgaaaatatgttctggtatcgacaagacccaggtctggggctacggctgatctatttctcatatgatgttaaaatgaaagaaaaaggagatattcctgaggggtacagtgtctctagagagaagaaggagcgcttctccctgattctggagtccgccagcaccaaccagacatctatgtacctctgtgccagcagttttagtagtaactcctacgagcagtacttcgggccgggcaccaggctcacggtcacagaggacctgaaaaacgtgttcccacccaaggtcgctgtgtttgagccatcagaagcagagatctcccacacccaaaaggccacactggtgtgcctggccacaggcttctaccccgaccacgtggagctgagctggtgggtgaatgggaaggaggtgcacagtggggtcagcacagacccgcagcccctcaaggagcagcccgccctcaatgactccagatactgcctgagcagccgcctgagggtctcggccaccttctggcagaacccccgcaaccacttccgctgtcaagtccagttctacgggctctcggagaatgacgagtggacccaggatagggccaaacctgtcacccagatcgtcagcgccgaggcctggggtagagcagactgtggcttcacctccgagtcttaccagcaaggggtcctgtctgccaccatcctctatgagatcttgctagggaaggccaccttgtatgccgtgctggtcagtgccctcgtgctgatggccatggtcaagagaaaggattccagaggc

SEQ ID NO: 1269 - DNA, 933 bp, Homo sapiens
  TCR_51Beta chain
atgggcccccagctccttggctatgtggtcctttgccttctaggagcaggccccctggaagcccaagtgacccagaacccaagatacctcatcacagtgactggaaagaagttaacagtgacttgttctcagaatatgaaccatgagtatatgtcctggtatcgacaagacccagggctgggcttaaggcagatctactattcaatgaatgttgaggtgactgataagggagatgttcctgaagggtacaaagtctctcgaaaagagaagaggaatttccccctgatcctggagtcgcccagccccaaccagacctctctgtacttctgtgccagcagtaccgggacggtggggtacgagcagtacttcgggccgggcaccaggctcacggtcacagaggacctgaaaaacgtgttcccacccaaggtcgctgtgtttgagccatcagaagcagagatctcccacacccaaaaggccacactggtgtgcctggccacaggcttctaccccgaccacgtggagctgagctggtgggtgaatgggaaggaggtgcacagtggggtcagcacagacccgcagcccctcaaggagcagcccgccctcaatgactccagatactgcctgagcagccgcctgagggtctcggccaccttctggcagaacccccgcaaccacttccgctgtcaagtccagttctacgggctctcggagaatgacgagtggacccaggatagggccaaacctgtcacccagatcgtcagcgccgaggcctggggtagagcagactgtggcttcacctccgagtcttaccagcaaggggtcctgtctgccaccatcctctatgagatcttgctagggaaggccaccttgtatgccgtgctggtcagtgccctcgtgctgatggccatggtcaagagaaaggattccagaggc

SEQ ID NO: 1270 - DNA, 933 bp, Homo sapiens
  TCR_52Beta chain
atgggaatcaggctcctctgtcgtgtggccttttgtttcctggctgtaggcctcgtagatgtgaaagtaacccagagctcgagatatctagtcaaaaggacgggagagaaagtttttctggaatgtgtccaggatatggaccatgaaaatatgttctggtatcgacaagacccaggtctggggctacggctgatctatttctcatatgatgttaaaatgaaagaaaaaggagatattcctgaggggtacagtgtctctagagagaagaaggagcgcttctccctgattctggagtccgccagcaccaaccagacatctatgtacctctgtgccagcagtttagcttccaataattacgagcagtacttcgggccgggcaccaggctcacggtcacagaggacctgaaaaacgtgttcccacccaaggtcgctgtgtttgagccatcagaagcagagatctcccacacccaaaaggccacactggtgtgcctggccacaggcttctaccccgaccacgtggagctgagctggtgggtgaatgggaaggaggtgcacagtggggtcagcacagacccgcagcccctcaaggagcagcccgccctcaatgactccagatactgcctgagcagccgcctgagggtctcggccaccttctggcagaacccccgcaaccacttccgctgtcaagtccagttctacgggctctcggagaatgacgagtggacccaggatagggccaaacctgtcacccagatcgtcagcgccgaggcctggggtagagcagactgtggcttcacctccgagtcttaccagcaaggggtcctgtctgccaccatcctctatgagatcttgctagggaaggccaccttgtatgccgtgctggtcagtgccctcgtgctgatggccatggtcaagagaaaggattccagaggc

SEQ ID NO: 1271 - DNA, 936 bp, Homo sapiens
  TCR_53Beta chain
atgggcttcaggctcctctgctgtgtggccttttgtctcctgggagcaggcccagtggattctggagtcacacaaaccccaaagcacctgatcacagcaactggacagcgagtgacgctgagatgctcccctaggtctggagacctctctgtgtactggtaccaacagagcctggaccagggcctccagttcctcattcagtattataatggagaagagagagcaaaaggaaacattcttgaacgattctccgcacaacagttccctgacttgcactctgaactaaacctgagctctctggagctgggggactcagctttgtatttctgtgccagcagcgtaggcgggagttggacagatacgcagtattttggcccaggcacccggctgacagtgctcgaggacctgaaaaacgtgttcccacccaaggtcgctgtgtttgagccatcagaagcagagatctcccacacccaaaaggccacactggtgtgcctggccacaggcttctaccccgaccacgtggagctgagctggtgggtgaatgggaaggaggtgcacagtggggtcagcacagacccgcagcccctcaaggagcagcccgccctcaatgactccagatactgcctgagcagccgcctgagggtctcggccaccttctggcagaacccccgcaaccacttccgctgtcaagtccagttctacgggctctcggagaatgacgagtggacccaggatagggccaaacctgtcacccagatcgtcagcgccgaggcctggggtagagcagactgtggcttcacctccgagtcttaccagcaaggggtcctgtctgccaccatcctctatgagatcttgctagggaaggccaccttgtatgccgtgctggtcagtgccctcgtgctgatggccatggtcaagagaaaggattccagaggc

SEQ ID NO: 1272 - DNA, 918 bp, Homo sapiens
  TCR_54Beta chain
atgctgctgcttctgctgcttctggggccaggctccgggcttggtgctgtcgtctctcaacatccgagctgggttatctgtaagagtggaacctctgtgaagatcgagtgccgttccctggactttcaggccacaactatgttttggtatcgtcagttcccgaaacagagtctcatgctgatggcaacttccaatgagggctccaaggccacatacgagcaaggcgtcgagaaggacaagtttctcatcaaccatgcaagcctgaccttgtccactctgacagtgaccagtgcccatcctgaagacagcagcttctacatctgcagtgccagcccgttgctcgagcagtacttcgggccgggcaccaggctcacggtcacagaggacctgaaaaacgtgttcccacccaaggtcgctgtgtttgagccatcagaagcagagatctcccacacccaaaaggccacactggtgtgcctggccacaggcttctaccccgaccacgtggagctgagctggtgggtgaatgggaaggaggtgcacagtggggtcagcacagacccgcagcccctcaaggagcagcccgccctcaatgactccagatactgcctgagcagccgcctgagggtctcggccaccttctggcagaacccccgcaaccacttccgctgtcaagtccagttctacgggctctcggagaatgacgagtggacccaggatagggccaaacctgtcacccagatcgtcagcgccgaggcctggggtagagcagactgtggcttcacctccgagtcttaccagcaaggggtcctgtctgccaccatcctctatgagatcttgctagggaaggccaccttgtatgccgtgctggtcagtgccctcgtgctgatggccatggtcaagagaaaggattccagaggc

SEQ ID NO: 1273 - DNA, 933 bp, Homo sapiens
  TCR_55Beta chain
atgggcttcaggctcctctgctgtgtggccttttgtctcctgggagcaggcccagtggattctggagtcacacaaaccccaaagcacctgatcacagcaactggacagcgagtgacgctgagatgctcccctaggtctggagacctctctgtgtactggtaccaacagagcctggaccagggcctccagttcctcattcagtattataatggagaagagagagcaaaaggaaacattcttgaacgattctccgcacaacagttccctgacttgcactctgaactaaacctgagctctctggagctgggggactcagctttgtatttctgtgccagcagcgtagtggacagaaacaatgagcagttcttcgggccagggacacggctcaccgtgctagaggacctgaaaaacgtgttcccacccaaggtcgctgtgtttgagccatcagaagcagagatctcccacacccaaaaggccacactggtgtgcctggccacaggcttctaccccgaccacgtggagctgagctggtgggtgaatgggaaggaggtgcacagtggggtcagcacagacccgcagcccctcaaggagcagcccgccctcaatgactccagatactgcctgagcagccgcctgagggtctcggccaccttctggcagaacccccgcaaccacttccgctgtcaagtccagttctacgggctctcggagaatgacgagtggacccaggatagggccaaacctgtcacccagatcgtcagcgccgaggcctggggtagagcagactgtggcttcacctccgagtcttaccagcaaggggtcctgtctgccaccatcctctatgagatcttgctagggaaggccaccttgtatgccgtgctggtcagtgccctcgtgctgatggccatggtcaagagaaaggattccagaggc

SEQ ID NO: 1274 - DNA, 927 bp, Homo sapiens
  TCR_56Beta chain
atgggccctgggctcctctgctgggtgctgctttgtctcctgggagcaggcccagtggacgctggagtcacccaaagtcccacacacctgatcaaaacgagaggacagcaagtgactctgagatgctctcctatctctgggcacaagagtgtgtcctggtaccaacaggtcctgggtcaggggccccagtttatctttcagtattatgagaaagaagagagaggaagaggaaacttccctgatcgattctcagctcgccagttccctaactatagctctgagctgaatgtgaacgccttgttgctgggggactcggccctgtatctctgtgccagcagcttgtgggggggctacactgaagctttctttggacaaggcaccagactcacagttgtagaggacctgaacaaggtgttcccacccgaggtcgctgtgtttgagccatcagaagcagagatctcccacacccaaaaggccacactggtgtgcctggccacaggcttcttccctgaccacgtggagctgagctggtgggtgaatgggaaggaggtgcacagtggggtcagcacggacccgcagcccctcaaggagcagcccgccctcaatgactccagatactgcctgagcagccgcctgagggtctcggccaccttctggcagaacccccgcaaccacttccgctgtcaagtccagttctacgggctctcggagaatgacgagtggacccaggatagggccaaacccgtcacccagatcgtcagcgccgaggcctggggtagagcagactgtggctttacctcggtgtcctaccagcaaggggtcctgtctgccaccatcctctatgagatcctgctagggaaggccaccctgtatgctgtgctggtcagcgcccttgtgttgatggccatggtcaagagaaaggatttc

SEQ ID NO: 1275 - DNA, 924 bp, Homo sapiens
  TCR_57Beta chain
atgggcaccaggctcctcttctgggtggccttctgtctcctgggggcagatcacacaggagctggagtctcccagtcccccagtaacaaggtcacagagaagggaaaggatgtagagctcaggtgtgatccaatttcaggtcatactgccctttactggtaccgacagagcctggggcagggcctggagtttttaatttacttccaaggcaacagtgcaccagacaaatcagggctgcccagtgatcgcttctctgcagagaggactgggggatccgtctccactctgacgatccagcgcacacagcaggaggactcggccgtgtatctctgtgccagcagcgagagtaactatggctacaccttcggttcggggaccaggttaaccgttgtagaggacctgaacaaggtgttcccacccgaggtcgctgtgtttgagccatcagaagcagagatctcccacacccaaaaggccacactggtgtgcctggccacaggcttcttccctgaccacgtggagctgagctggtgggtgaatgggaaggaggtgcacagtggggtcagcacggacccgcagcccctcaaggagcagcccgccctcaatgactccagatactgcctgagcagccgcctgagggtctcggccaccttctggcagaacccccgcaaccacttccgctgtcaagtccagttctacgggctctcggagaatgacgagtggacccaggatagggccaaacccgtcacccagatcgtcagcgccgaggcctggggtagagcagactgtggctttacctcggtgtcctaccagcaaggggtcctgtctgccaccatcctctatgagatcctgctagggaaggccaccctgtatgctgtgctggtcagcgcccttgtgttgatggccatggtcaagagaaaggatttc

SEQ ID NO: 1276 - DNA, 930 bp, Homo sapiens
  TCR_58Beta chain
atggactcctggaccttctgctgtgtgtccctttgcatcctggtagcgaagcatacagatgctggagttatccagtcaccccgccatgaggtgacagagatgggacaagaagtgactctgagatgtaaaccaatttcaggccacaactcccttttctggtacagacagaccatgatgcggggactggagttgctcatttactttaacaacaacgttccgatagatgattcagggatgcccgaggatcgattctcagctaagatgcctaatgcatcattctccactctgaagatccagccctcagaacccagggactcagctgtgtacttctgtgccacatccggggacaggggatggcagtacttcgggccgggcaccaggctcacggtcacagaggacctgaaaaacgtgttcccacccaaggtcgctgtgtttgagccatcagaagcagagatctcccacacccaaaaggccacactggtgtgcctggccacaggcttctaccccgaccacgtggagctgagctggtgggtgaatgggaaggaggtgcacagtggggtcagcacagacccgcagcccctcaaggagcagcccgccctcaatgactccagatactgcctgagcagccgcctgagggtctcggccaccttctggcagaacccccgcaaccacttccgctgtcaagtccagttctacgggctctcggagaatgacgagtggacccaggatagggccaaacctgtcacccagatcgtcagcgccgaggcctggggtagagcagactgtggcttcacctccgagtcttaccagcaaggggtcctgtctgccaccatcctctatgagatcttgctagggaaggccaccttgtatgccgtgctggtcagtgccctcgtgctgatggccatggtcaagagaaaggattccagaggc

SEQ ID NO: 1277 - DNA, 927 bp, Homo sapiens
  TCR_59Beta chain
atgggtcctgggcttctccactggatggccctttgtctccttggaacaggtcatggggatgccatggtcatccagaacccaagataccaggttacccagtttggaaagccagtgaccctgagttgttctcagactttgaaccataacgtcatgtactggtaccagcagaagtcaagtcaggccccaaagctgctgttccactactatgacaaagattttaacaatgaagcagacacccctgataacttccaatccaggaggccgaacacttctttctgctttcttgacatccgctcaccaggcctgggggacacagccatgtacctgtgtgccaccaggggggtcggagagacccagtacttcgggccaggcacgcggctcctggtgctcgaggacctgaaaaacgtgttcccacccaaggtcgctgtgtttgagccatcagaagcagagatctcccacacccaaaaggccacactggtgtgcctggccacaggcttctaccccgaccacgtggagctgagctggtgggtgaatgggaaggaggtgcacagtggggtcagcacagacccgcagcccctcaaggagcagcccgccctcaatgactccagatactgcctgagcagccgcctgagggtctcggccaccttctggcagaacccccgcaaccacttccgctgtcaagtccagttctacgggctctcggagaatgacgagtggacccaggatagggccaaacctgtcacccagatcgtcagcgccgaggcctggggtagagcagactgtggcttcacctccgagtcttaccagcaaggggtcctgtctgccaccatcctctatgagatcttgctagggaaggccaccttgtatgccgtgctggtcagtgccctcgtgctgatggccatggtcaagagaaaggattccagaggc

SEQ ID NO: 1278 - DNA, 945 bp, Homo sapiens
  TCR_60Beta chain
atgggccccgggctcctctgctgggcactgctttgtctcctgggagcaggcttagtggacgctggagtcacccaaagtcccacacacctgatcaaaacgagaggacagcaagtgactctgagatgctctcctaagtctgggcatgacactgtgtcctggtaccaacaggccctgggtcaggggccccagtttatctttcagtattatgaggaggaagagagacagagaggcaacttccctgatcgattctcaggtcaccagttccctaactatagctctgagctgaatgtgaacgccttgttgctgggggactcggccctctatctctgtgccagcagcttggggcaggggagtcccgccggggccaacgtcctgactttcggggccggcagcaggctgaccgtgctggaggacctgaaaaacgtgttcccacccaaggtcgctgtgtttgagccatcagaagcagagatctcccacacccaaaaggccacactggtgtgcctggccacaggcttctaccccgaccacgtggagctgagctggtgggtgaatgggaaggaggtgcacagtggggtcagcacagacccgcagcccctcaaggagcagcccgccctcaatgactccagatactgcctgagcagccgcctgagggtctcggccaccttctggcagaacccccgcaaccacttccgctgtcaagtccagttctacgggctctcggagaatgacgagtggacccaggatagggccaaacctgtcacccagatcgtcagcgccgaggcctggggtagagcagactgtggcttcacctccgagtcttaccagcaaggggtcctgtctgccaccatcctctatgagatcttgctagggaaggccaccttgtatgccgtgctggtcagtgccctcgtgctgatggccatggtcaagagaaaggattccagaggc

SEQ ID NO: 1279 - DNA, 933 bp, Homo sapiens
  TCR_61Beta chain
atgggccctgggctcctctgctgggcgctgctttgtctcctgggagcaggctcagtggagactggagtcacccaaagtcccacacacctgatcaaaacgagaggacagcaagtgactctgagatgctcttctcagtctgggcacaacactgtgtcctggtaccaacaggccctgggtcaggggccccagtttatctttcagtattatagggaggaagagaatggcagaggaaacttccctcctagattctcaggtctccagttccctaattatagctctgagctgaatgtgaacgccttggagctggacgactcggccctgtatctctgtgccagcagccaggacagggataacttgaacactgaagctttctttggacaaggcaccagactcacagttgtagaggacctgaacaaggtgttcccacccgaggtcgctgtgtttgagccatcagaagcagagatctcccacacccaaaaggccacactggtgtgcctggccacaggcttcttccctgaccacgtggagctgagctggtgggtgaatgggaaggaggtgcacagtggggtcagcacggacccgcagcccctcaaggagcagcccgccctcaatgactccagatactgcctgagcagccgcctgagggtctcggccaccttctggcagaacccccgcaaccacttccgctgtcaagtccagttctacgggctctcggagaatgacgagtggacccaggatagggccaaacccgtcacccagatcgtcagcgccgaggcctggggtagagcagactgtggctttacctcggtgtcctaccagcaaggggtcctgtctgccaccatcctctatgagatcctgctagggaaggccaccctgtatgctgtgctggtcagcgcccttgtgttgatggccatggtcaagagaaaggatttc

SEQ ID NO: 1280 - DNA, 939 bp, Homo sapiens
  TCR_62Beta chain
atgggcaccaggctcctcttctgggtggccttctgtctcctgggggcagatcacacaggagctggagtctcccagtcccccagtaacaaggtcacagagaagggaaaggatgtagagctcaggtgtgatccaatttcaggtcatactgccctttactggtaccgacagagcctggggcagggcctggagtttttaatttacttccaaggcaacagtgcaccagacaaatcagggctgcccagtgatcgcttctctgcagagaggactgggggatccgtctccactctgacgatccagcgcacacagcaggaggactcggccgtgtatctctgtgccagcagcttactgggttccaaccaagagacccagtacttcgggccaggcacgcggctcctggtgctcgaggacctgaaaaacgtgttcccacccaaggtcgctgtgtttgagccatcagaagcagagatctcccacacccaaaaggccacactggtgtgcctggccacaggcttctaccccgaccacgtggagctgagctggtgggtgaatgggaaggaggtgcacagtggggtcagcacagacccgcagcccctcaaggagcagcccgccctcaatgactccagatactgcctgagcagccgcctgagggtctcggccaccttctggcagaacccccgcaaccacttccgctgtcaagtccagttctacgggctctcggagaatgacgagtggacccaggatagggccaaacctgtcacccagatcgtcagcgccgaggcctggggtagagcagactgtggcttcacctccgagtcttaccagcaaggggtcctgtctgccaccatcctctatgagatcttgctagggaaggccaccttgtatgccgtgctggtcagtgccctcgtgctgatggccatggtcaagagaaaggattccagaggc

SEQ ID NO: 1281 - DNA, 939 bp, Homo sapiens
  TCR_63Beta chain
atgggccccgggctcctctgctgggcactgctttgtctcctgggagcaggcttagtggacgctggagtcacccaaagtcccacacacctgatcaaaacgagaggacagcaagtgactctgagatgctctcctaagtctgggcatgacactgtgtcctggtaccaacaggccctgggtcaggggccccagtttatctttcagtattatgaggaggaagagagacagagaggcaacttccctgatcgattctcaggtcaccagttccctaactatagctctgagctgaatgtgaacgccttgttgctgggggactcggccctctatctctgtgccagcagccccgtagcgggggggaacaccggggagctgttttttggagaaggctctaggctgaccgtactggaggacctgaaaaacgtgttcccacccaaggtcgctgtgtttgagccatcagaagcagagatctcccacacccaaaaggccacactggtgtgcctggccacaggcttctaccccgaccacgtggagctgagctggtgggtgaatgggaaggaggtgcacagtggggtcagcacagacccgcagcccctcaaggagcagcccgccctcaatgactccagatactgcctgagcagccgcctgagggtctcggccaccttctggcagaacccccgcaaccacttccgctgtcaagtccagttctacgggctctcggagaatgacgagtggacccaggatagggccaaacctgtcacccagatcgtcagcgccgaggcctggggtagagcagactgtggcttcacctccgagtcttaccagcaaggggtcctgtctgccaccatcctctatgagatcttgctagggaaggccaccttgtatgccgtgctggtcagtgccctcgtgctgatggccatggtcaagagaaaggattccagaggc

SEQ ID NO: 1282 - DNA, 921 bp, Homo sapiens; identical to SEQ ID NO: 1241
  TCR_64Beta chain

SEQ ID NO: 1283 - DNA, 927 bp, Homo sapiens
  TCR_65Beta chain
atgctctgctctctccttgcccttctcctgggcactttctttggggtcagatctcagactattcatcaatggccagcgaccctggtgcagcctgtgggcagcccgctctctctggagtgcactgtggagggaacatcaaaccccaacctatactggtaccgacaggctgcaggcaggggcctccagctgctcttctactccgttggtattggccagatcagctctgaggtgccccagaatctctcagcctccagaccccaggaccggcagttcatcctgagttctaagaagctccttctcagtgactctggcttctatctctgtgcctggctccgggatatgaacaccggggagctgttttttggagaaggctctaggctgaccgtactggaggacctgaaaaacgtgttcccacccaaggtcgctgtgtttgagccatcagaagcagagatctcccacacccaaaaggccacactggtgtgcctggccacaggcttctaccccgaccacgtggagctgagctggtgggtgaatgggaaggaggtgcacagtggggtcagcacagacccgcagcccctcaaggagcagcccgccctcaatgactccagatactgcctgagcagccgcctgagggtctcggccaccttctggcagaacccccgcaaccacttccgctgtcaagtccagttctacgggctctcggagaatgacgagtggacccaggatagggccaaacctgtcacccagatcgtcagcgccgaggcctggggtagagcagactgtggcttcacctccgagtcttaccagcaaggggtcctgtctgccaccatcctctatgagatcttgctagggaaggccaccttgtatgccgtgctggtcagtgccctcgtgctgatggccatggtcaagagaaaggattccagaggc

SEQ ID NO: 1284 - DNA, 930 bp, Homo sapiens
  TCR_66Beta chain
atgagcaaccaggtgctctgctgtgtggtcctttgtttcctgggagcaaacaccgtggatggtggaatcactcagtccccaaagtacctgttcagaaaggaaggacagaatgtgaccctgagttgtgaacagaatttgaaccacgatgccatgtactggtaccgacaggacccagggcaagggctgagattgatctactactcacagatagtaaatgactttcagaaaggagatatagctgaagggtacagcgtctctcgggagaagaaggaatcctttcctctcactgtgacatcggcccaaaagaacccgacagctttctatctctgtgccagtatggacctgaacaccggggagctgttttttggagaaggctctaggctgaccgtactggaggacctgaaaaacgtgttcccacccaaggtcgctgtgtttgagccatcagaagcagagatctcccacacccaaaaggccacactggtgtgcctggccacaggcttctaccccgaccacgtggagctgagctggtgggtgaatgggaaggaggtgcacagtggggtcagcacagacccgcagcccctcaaggagcagcccgccctcaatgactccagatactgcctgagcagccgcctgagggtctcggccaccttctggcagaacccccgcaaccacttccgctgtcaagtccagttctacgggctctcggagaatgacgagtggacccaggatagggccaaacctgtcacccagatcgtcagcgccgaggcctggggtagagcagactgtggcttcacctccgagtcttaccagcaaggggtcctgtctgccaccatcctctatgagatcttgctagggaaggccaccttgtatgccgtgctggtcagtgccctcgtgctgatggccatggtcaagagaaaggattccagaggc

SEQ ID NO: 1285 - DNA, 924 bp, Homo sapiens
  TCR_67Beta chain
atgagcaaccaggtgctctgctgtgtggtcctttgtttcctgggagcaaacaccgtggatggtggaatcactcagtccccaaagtacctgttcagaaaggaaggacagaatgtgaccctgagttgtgaacagaatttgaaccacgatgccatgtactggtaccgacaggacccagggcaagggctgagattgatctactactcacagatagtaaatgactttcagaaaggagatatagctgaagggtacagcgtctctcgggagaagaaggaatcctttcctctcactgtgacatcggcccaaaagaacccgacagctttctatctctgtgccagtagtatcggactaggtggtggctacaccttcggttcggggaccaggttaaccgttgtagaggacctgaacaaggtgttcccacccgaggtcgctgtgtttgagccatcagaagcagagatctcccacacccaaaaggccacactggtgtgcctggccacaggcttcttccctgaccacgtggagctgagctggtgggtgaatgggaaggaggtgcacagtggggtcagcacggacccgcagcccctcaaggagcagcccgccctcaatgactccagatactgcctgagcagccgcctgagggtctcggccaccttctggcagaacccccgcaaccacttccgctgtcaagtccagttctacgggctctcggagaatgacgagtggacccaggatagggccaaacccgtcacccagatcgtcagcgccgaggcctggggtagagcagactgtggctttacctcggtgtcctaccagcaaggggtcctgtctgccaccatcctctatgagatcctgctagggaaggccaccctgtatgctgtgctggtcagcgcccttgtgttgatggccatggtcaagagaaaggatttc

SEQ ID NO: 1286 - DNA, 927 bp, Homo sapiens
  TCR_68Beta chain
atgctctgctctctccttgcccttctcctgggcactttctttggggtcagatctcagactattcatcaatggccagcgaccctggtgcagcctgtgggcagcccgctctctctggagtgcactgtggagggaacatcaaaccccaacctatactggtaccgacaggctgcaggcaggggcctccagctgctcttctactccgttggtattggccagatcagctctgaggtgccccagaatctctcagcctccagaccccaggaccggcagttcatcctgagttctaagaagctccttctcagtgactctggcttctatctctgtgcctaccaaccccccgggggaggaaacattcagtacttcggcgccgggacccggctctcagtgctggaggacctgaaaaacgtgttcccacccaaggtcgctgtgtttgagccatcagaagcagagatctcccacacccaaaaggccacactggtgtgcctggccacaggcttctaccccgaccacgtggagctgagctggtgggtgaatgggaaggaggtgcacagtggggtcagcacagacccgcagcccctcaaggagcagcccgccctcaatgactccagatactgcctgagcagccgcctgagggtctcggccaccttctggcagaacccccgcaaccacttccgctgtcaagtccagttctacgggctctcggagaatgacgagtggacccaggatagggccaaacctgtcacccagatcgtcagcgccgaggcctggggtagagcagactgtggcttcacctccgagtcttaccagcaaggggtcctgtctgccaccatcctctatgagatcttgctagggaaggccaccttgtatgccgtgctggtcagtgccctcgtgctgatggccatggtcaagagaaaggattccagaggc

SEQ ID NO: 1287 - DNA, 948 bp, Homo sapiens
  TCR_69Beta chain
atgggctccaggctgctctgttgggtgctgctttgtctcctgggagcaggcccagtaaaggctggagtcactcaaactccaagatatctgatcaaaacgagaggacagcaagtgacactgagctgctcccctatctctgggcataggagtgtatcctggtaccaacagaccccaggacagggccttcagttcctctttgaatacttcagtgagacacagagaaacaaaggaaacttccctggtcgattctcagggcgccagttctctaactctcgctctgagatgaatgtgagcaccttggagctgggggactcggccctttatctttgcgccagcagcttggccatggggactagcggggggccctacaatgagcagttcttcgggccagggacacggctcaccgtgctagaggacctgaaaaacgtgttcccacccaaggtcgctgtgtttgagccatcagaagcagagatctcccacacccaaaaggccacactggtgtgcctggccacaggcttctaccccgaccacgtggagctgagctggtgggtgaatgggaaggaggtgcacagtggggtcagcacagacccgcagcccctcaaggagcagcccgccctcaatgactccagatactgcctgagcagccgcctgagggtctcggccaccttctggcagaacccccgcaaccacttccgctgtcaagtccagttctacgggctctcggagaatgacgagtggacccaggatagggccaaacctgtcacccagatcgtcagcgccgaggcctggggtagagcagactgtggcttcacctccgagtcttaccagcaaggggtcctgtctgccaccatcctctatgagatcttgctagggaaggccaccttgtatgccgtgctggtcagtgccctcgtgctgatggccatggtcaagagaaaggattccagaggc

SEQ ID NO: 1288 - DNA, 936 bp, Homo sapiens
  TCR_70Beta chain
atggacaccagagtactctgctgtgcggtcatctgtcttctgggggcaggtctctcaaatgccggcgtcatgcagaacccaagacacctggtcaggaggaggggacaggaggcaagactgagatgcagcccagtgaaaggacacagtcatgtttactggtatcggcagctcccagaggaaggtctgaaattcatggtttatctccagaaagaaaatatcatagatgagtcaggaatgccaaaggaacgattttctgctgaatttcccaaagagggccccagcatcctgaggatccagcaggtagtgcgaggagattcggcagcttatttctgtgccagctcacgaccttccggacagggaaataatggctacaccttcggttcggggaccaggttaaccgttgtagaggacctgaacaaggtgttcccacccgaggtcgctgtgtttgagccatcagaagcagagatctcccacacccaaaaggccacactggtgtgcctggccacaggcttcttccctgaccacgtggagctgagctggtgggtgaatgggaaggaggtgcacagtggggtcagcacggacccgcagcccctcaaggagcagcccgccctcaatgactccagatactgcctgagcagccgcctgagggtctcggccaccttctggcagaacccccgcaaccacttccgctgtcaagtccagttctacgggctctcggagaatgacgagtggacccaggatagggccaaacccgtcacccagatcgtcagcgccgaggcctggggtagagcagactgtggctttacctcggtgtcctaccagcaaggggtcctgtctgccaccatcctctatgagatcctgctagggaaggccaccctgtatgctgtgctggtcagcgcccttgtgttgatggccatggtcaagagaaaggatttc

SEQ ID NO: 1289 - DNA, 933 bp, Homo sapiens
  TCR_71Beta chain
atgggcaccaggctcctctgctgggcggccctctgtctcctgggagcagaactcacagaagctggagttgcccagtctcccagatataagattatagagaaaaggcagagtgtggctttttggtgcaatcctatatctggccatgctaccctttactggtaccagcagatcctgggacagggcccaaagcttctgattcagtttcagaataacggtgtagtggatgattcacagttgcctaaggatcgattttctgcagagaggctcaaaggagtagactccactctcaagatccagcctgcaaagcttgaggactcggccgtgtatctctgtgccagcagcttagatagttctttgggctatggctacaccttcggttcggggaccaggttaaccgttgtagaggacctgaacaaggtgttcccacccgaggtcgctgtgtttgagccatcagaagcagagatctcccacacccaaaaggccacactggtgtgcctggccacaggcttcttccctgaccacgtggagctgagctggtgggtgaatgggaaggaggtgcacagtggggtcagcacggacccgcagcccctcaaggagcagcccgccctcaatgactccagatactgcctgagcagccgcctgagggtctcggccaccttctggcagaacccccgcaaccacttccgctgtcaagtccagttctacgggctctcggagaatgacgagtggacccaggatagggccaaacccgtcacccagatcgtcagcgccgaggcctggggtagagcagactgtggctttacctcggtgtcctaccagcaaggggtcctgtctgccaccatcctctatgagatcctgctagggaaggccaccctgtatgctgtgctggtcagcgcccttgtgttgatggccatggtcaagagaaaggatttc

SEQ ID NO: 1290 - DNA, 924 bp, Homo sapiens
  TCR_72Beta chain
atgctgctgcttctgctgcttctggggccaggctccgggcttggtgctgtcgtctctcaacatccgagcagggttatctgtaagagtggaacctctgtgaagatcgagtgccgttccctggactttcaggccacaactatgttttggtatcgtcagttcccgaaacagagtctcatgctgatggcaacttccaatgagggctccaaggccacatacgagcaaggcgtcgagaaggacaagtttctcatcaaccatgcaagcctgaccttgtccactctgacagtgaccagtgcccatcctgaagacagcagcttctacatctgcagtgccatcgaggaggggacagaagttttcggctacaccttcggttcggggaccaggttaaccgttgtagaggacctgaacaaggtgttcccacccgaggtcgctgtgtttgagccatcagaagcagagatctcccacacccaaaaggccacactggtgtgcctggccacaggcttcttccctgaccacgtggagctgagctggtgggtgaatgggaaggaggtgcacagtggggtcagcacggacccgcagcccctcaaggagcagcccgccctcaatgactccagatactgcctgagcagccgcctgagggtctcggccaccttctggcagaacccccgcaaccacttccgctgtcaagtccagttctacgggctctcggagaatgacgagtggacccaggatagggccaaacccgtcacccagatcgtcagcgccgaggcctggggtagagcagactgtggctttacctcggtgtcctaccagcaaggggtcctgtctgccaccatcctctatgagatcctgctagggaaggccaccctgtatgctgtgctggtcagcgcccttgtgttgatggccatggtcaagagaaaggatttc

SEQ ID NO: 1291 - DNA, 936 bp, Homo sapiens
  TCR_73Beta chain
atgagcaaccaggtgctctgctgtgtggtcctttgtctcctgggagcaaacaccgtggatggtggaatcactcagtccccaaagtacctgttcagaaaggaaggacagaatgtgaccctgagttgtgaacagaatttgaaccacgatgccatgtactggtaccgacaggacccagggcaagggctgagattgatctactactcacagatagtaaatgactttcagaaaggagatatagctgaagggtacagcgtctctcgggagaagaaggaatcctttcctctcactgtgacatcggcccaaaagaacccgacagctttctatctctgtgccagtagtataaacccgtcaagttacaatgagcagttcttcgggccagggacacggctcaccgtgctagaggacctgaaaaacgtgttcccacccaaggtcgctgtgtttgagccatcagaagcagagatctcccacacccaaaaggccacactggtgtgcctggccacaggcttctaccccgaccacgtggagctgagctggtgggtgaatgggaaggaggtgcacagtggggtcagcacagacccgcagcccctcaaggagcagcccgccctcaatgactccagatactgcctgagcagccgcctgagggtctcggccaccttctggcagaacccccgcaaccacttccgctgtcaagtccagttctacgggctctcggagaatgacgagtggacccaggatagggccaaacctgtcacccagatcgtcagcgccgaggcctggggtagagcagactgtggcttcacctccgagtcttaccagcaaggggtcctgtctgccaccatcctctatgagatcttgctagggaaggccaccttgtatgccgtgctggtcagtgccctcgtgctgatggccatggtcaagagaaaggattccagaggc

SEQ ID NO: 1292 - DNA, 933 bp, Homo sapiens
  TCR_74Beta chain
atggatacctggctcgtatgctgggcaatttttagtctcttgaaagcaggactcacagaacctgaagtcacccagactcccagccatcaggtcacacagatgggacaggaagtgatcttgcgctgtgtccccatctctaatcacttatacttctattggtacagacaaatcttggggcagaaagtcgagtttctggtttccttttataataatgaaatctcagagaagtctgaaatattcgatgatcaattctcagttgaaaggcctgatggatcaaatttcactctgaagatccggtccacaaagctggaggactcagccatgtacttctgtgccaccgggggtctgaacaccggggagctgttttttggagaaggctctaggctgaccgtactggaggacctgaaaaacgtgttcccacccaaggtcgctgtgtttgagccatcagaagcagagatctcccacacccaaaaggccacactggtgtgcctggccacaggcttctaccccgaccacgtggagctgagctggtgggtgaatgggaaggaggtgcacagtggggtcagcacagacccgcagcccctcaaggagcagcccgccctcaatgactccagatactgcctgagcagccgcctgagggtctcggccaccttctggcagaacccccgcaaccacttccgctgtcaagtccagttctacgggctctcggagaatgacgagtggacccaggatagggccaaacctgtcacccagatcgtcagcgccgaggcctggggtagagcagactgtggcttcacctccgagtcttaccagcaaggggtcctgtctgccaccatcctctatgagatcttgctagggaaggccaccttgtatgccgtgctggtcagtgccctcgtgctgatggccatggtcaagagaaaggattccagaggc

SEQ ID NO: 1293 - DNA, 927 bp, Homo sapiens
  TCR_75Beta chain
atgagcaaccaggtgctctgctgtgtggtcctttgtttcctgggagcaaacaccgtggatggtggaatcactcagtccccaaagtacctgttcagaaaggaaggacagaatgtgaccctgagttgtgaacagaatttgaaccacgatgccatgtactggtaccgacaggacccagggcaagggctgagattgatctactactcacagatagtaaatgactttcagaaaggagatatagctgaagggtacagcgtctctcgggagaagaaggaatcctttcctctcactgtgacatcggcccaaaagaacccgacagctttctatctctgtgccagtaaaaaaacccccgtaggcactgaagctttctttggacaaggcaccagactcacagttgtagaggacctgaacaaggtgttcccacccgaggtcgctgtgtttgagccatcagaagcagagatctcccacacccaaaaggccacactggtgtgcctggccacaggcttcttccctgaccacgtggagctgagctggtgggtgaatgggaaggaggtgcacagtggggtcagcacggacccgcagcccctcaaggagcagcccgccctcaatgactccagatactgcctgagcagccgcctgagggtctcggccaccttctggcagaacccccgcaaccacttccgctgtcaagtccagttctacgggctctcggagaatgacgagtggacccaggatagggccaaacccgtcacccagatcgtcagcgccgaggcctggggtagagcagactgtggctttacctcggtgtcctaccagcaaggggtcctgtctgccaccatcctctatgagatcctgctagggaaggccaccctgtatgctgtgctggtcagcgcccttgtgttgatggccatggtcaagagaaaggatttc

SEQ ID NO: 1294 - DNA, 933 bp, Homo sapiens
  TCR_76Beta chain
atgctgctgcttctgctgcttctggggccaggctccgggcttggtgctgtcgtctctcaacatccgagctgggttatctgtaagagtggaacctctgtgaagatcgagtgccgttccctggactttcaggccacaactatgttttggtatcgtcagttcccgaaacagagtctcatgctgatggcaacttccaatgagggctccaaggccacatacgagcaaggcgtcgagaaggacaagtttctcatcaaccatgcaagcctgaccttgtccactctgacagtgaccagtgcccatcctgaagacagcagcttctacatctgcagtgctagagatgtggtcagtgggggacactacgagcagtacttcgggccgggcaccaggctcacggtcacagaggacctgaaaaacgtgttcccacccaaggtcgctgtgtttgagccatcagaagcagagatctcccacacccaaaaggccacactggtgtgcctggccacaggcttctaccccgaccacgtggagctgagctggtgggtgaatgggaaggaggtgcacagtggggtcagcacagacccgcagcccctcaaggagcagcccgccctcaatgactccagatactgcctgagcagccgcctgagggtctcggccaccttctggcagaacccccgcaaccacttccgctgtcaagtccagttctacgggctctcggagaatgacgagtggacccaggatagggccaaacctgtcacccagatcgtcagcgccgaggcctggggtagagcagactgtggcttcacctccgagtcttaccagcaaggggtcctgtctgccaccatcctctatgagatcttgctagggaaggccaccttgtatgccgtgctggtcagtgccctcgtgctgatggccatggtcaagagaaaggattccagaggc

SEQ ID NO: 1295 - DNA, 930 bp, Homo sapiens
  TCR_77Beta chain
atgggccccgggctcctctgctgggcactgctttgtctcctgggagcaggcttagtggacgctggagtcacccaaagtcccacacacctgatcaaaacgagaggacagcaagtgactctgagatgctctcctaagtctgggcatgacactgtgtcctggtaccaacaggccctgggtcaggggccccagtttatctttcagtattatgaggaggaagagagacagagaggcaacttccctgatcgattctcaggtcaccagttccctaactatagctctgagctgaatgtgaacgccttgttgctgggggactcggccctctatctctgtgccagcagcccagcggggggggcggtactccaagctttctttggacaaggcaccagactcacagttgtagaggacctgaacaaggtgttcccacccgaggtcgctgtgtttgagccatcagaagcagagatctcccacacccaaaaggccacactggtgtgcctggccacaggcttcttccctgaccacgtggagctgagctggtgggtgaatgggaaggaggtgcacagtggggtcagcacggacccgcagcccctcaaggagcagcccgccctcaatgactccagatactgcctgagcagccgcctgagggtctcggccaccttctggcagaacccccgcaaccacttccgctgtcaagtccagttctacgggctctcggagaatgacgagtggacccaggatagggccaaacccgtcacccagatcgtcagcgccgaggcctggggtagagcagactgtggctttacctcggtgtcctaccagcaaggggtcctgtctgccaccatcctctatgagatcctgctagggaaggccaccctgtatgctgtgctggtcagcgcccttgtgttgatggccatggtcaagagaaaggatttc

SEQ ID NO: 1296 - DNA, 933 bp, Homo sapiens
  TCR_78Beta chain
atgctgctgcttctgctgcttctggggccaggctccgggcttggtgctgtcgtctctcaacatccgagcagggttatctgtaagagtggaacctctgtgaagatcgagtgccgttccctggactttcaggccacaactatgttttggtatcgtcagttcccgaaacagagtctcatgctgatggcaacttccaatgagggctccaaggccacatacgagcaaggcgtcgagaaggacaagtttctcatcaaccatgcaagcctgaccttgtccactctgacagtgaccagtgcccatcctgaagacagcagcttctacatctgcagtgctagagatcaacaggggcagaacaccggggagctgttttttggagaaggctctaggctgaccgtactggaggacctgaaaaacgtgttcccacccaaggtcgctgtgtttgagccatcagaagcagagatctcccacacccaaaaggccacactggtgtgcctggccacaggcttctaccccgaccacgtggagctgagctggtgggtgaatgggaaggaggtgcacagtggggtcagcacagacccgcagcccctcaaggagcagcccgccctcaatgactccagatactgcctgagcagccgcctgagggtctcggccaccttctggcagaacccccgcaaccacttccgctgtcaagtccagttctacgggctctcggagaatgacgagtggacccaggatagggccaaacctgtcacccagatcgtcagcgccgaggcctggggtagagcagactgtggcttcacctccgagtcttaccagcaaggggtcctgtctgccaccatcctctatgagatcttgctagggaaggccaccttgtatgccgtgctggtcagtgccctcgtgctgatggccatggtcaagagaaaggattccagaggc

SEQ ID NO: 1297 - DNA, 927 bp, Homo sapiens
  TCR_79Beta chain
atgggcaccagcctcctctgctggatggccctgtgtctcctgggggcagatcacgcagatactggagtctcccaggaccccagacacaagatcacaaagaggggacagaatgtaactttcaggtgtgatccaatttctgaacacaaccgcctttattggtaccgacagaccctggggcagggcccagagtttctgacttacttccagaatgaagctcaactagaaaaatcaaggctgctcagtgatcggttctctgcagagaggcctaagggatctttctccaccttggagatccagcgcacagagcagggggactcggccatgtatctctgtgccagcagcccggatattgagcagttcttcgggccagggacacggctcaccgtgctagaggacctgaaaaacgtgttcccacccaaggtcgctgtgtttgagccatcagaagcagagatctcccacacccaaaaggccacactggtgtgcctggccacaggcttctaccccgaccacgtggagctgagctggtgggtgaatgggaaggaggtgcacagtggggtcagcacagacccgcagcccctcaaggagcagcccgccctcaatgactccagatactgcctgagcagccgcctgagggtctcggccaccttctggcagaacccccgcaaccacttccgctgtcaagtccagttctacgggctctcggagaatgacgagtggacccaggatagggccaaacctgtcacccagatcgtcagcgccgaggcctggggtagagcagactgtggcttcacctccgagtcttaccagcaaggggtcctgtctgccaccatcctctatgagatcttgctagggaaggccaccttgtatgccgtgctggtcagtgccctcgtgctgatggccatggtcaagagaaaggattccagaggc

SEQ ID NO: 1298 - DNA, 936 bp, Homo sapiens
  TCR_80Beta chain
atgagcaaccaggtgctctgctgtgtggtcctttgtctcctgggagcaaacaccgtggatggtggaatcactcagtccccgaagtacctgttcagaaaggaaggacagaatgtgaccctgagttgtgaacagaatttgaaccacgatgccatgtactggtaccgacaggacccagggcaagggctgagattgatctactactcacagatagtaaatgactttcagaaaggagatatagctgaagggtacagcgtctctcgggagaagaaggaatcctttcctctcactgtgacatcggcccaaaagaacccgacagctttctatctctgtgccaccaacccggcgggggggccctacaatgagcagttcttcgggccagggacacggctcaccgtgctagaggacctgaaaaacgtgttcccacccaaggtcgctgtgtttgagccatcagaagcagagatctcccacacccaaaaggccacactggtgtgcctggccacaggcttctaccccgaccacgtggagctgagctggtgggtgaatgggaaggaggtgcacagtggggtcagcacagacccgcagcccctcaaggagcagcccgccctcaatgactccagatactgcctgagcagccgcctgagggtctcggccaccttctggcagaacccccgcaaccacttccgctgtcaagtccagttctacgggctctcggagaatgacgagtggacccaggatagggccaaacctgtcacccagatcgtcagcgccgaggcctggggtagagcagactgtggcttcacctccgagtcttaccagcaaggggtcctgtctgccaccatcctctatgagatcttgctagggaaggccaccttgtatgccgtgctggtcagtgccctcgtgctgatggccatggtcaagagaaaggattccagaggc

SEQ ID NO: 1299 - DNA, 939 bp, Homo sapiens
  TCR_81Beta chain
atgggcacgaggctcttcttctatgtggccctttgtctgctgtgggcaggacacagggatgctgaaatcacccagagcccaagacacaagatcacagagacaggaaggcaggtgaccttggcgtgtcaccagacttggaaccacaacaatatgttctggtatcgacaagacctgggacatgggctgaggctgatccattactcatatggtgttcaagacactaacaaaggagaagtctcagatggctacagtgtctctagatcaaacacagaggacctccccctcactctggagtctgctgcctcctcccagacatctgtatatttctgcgccagcagtgacggacaccaagggctccaagagacccagtacttcgggccaggcacgcggctcctggtgctcgaggacctgaaaaacgtgttcccacccaaggtcgctgtgtttgagccatcagaagcagagatctcccacacccaaaaggccacactggtgtgcctggccacaggcttctaccccgaccacgtggagctgagctggtgggtgaatgggaaggaggtgcacagtggggtcagcacagacccgcagcccctcaaggagcagcccgccctcaatgactccagatactgcctgagcagccgcctgagggtctcggccaccttctggcagaacccccgcaaccacttccgctgtcaagtccagttctacgggctctcggagaatgacgagtggacccaggatagggccaaacctgtcacccagatcgtcagcgccgaggcctggggtagagcagactgtggcttcacctccgagtcttaccagcaaggggtcctgtctgccaccatcctctatgagatcttgctagggaaggccaccttgtatgccgtgctggtcagtgccctcgtgctgatggccatggtcaagagaaaggattccagaggc

SEQ ID NO: 1300 - DNA, 933 bp, Homo sapiens
  TCR_82Beta chain
atggactcctggaccttctgctgtgtgtccctttgcatcctggtagcgaagcatacagatgctggagttatccagtcaccccgccatgaggtgacagagatgggacaagaagtgactctgagatgtaaaccaatttcaggccacaactcccttttctggtacagacagaccatgatgcggggactggagttgctcatttactttaacaacaacgttccgatagatgattcagggatgcccgaggatcgattctcagctaagatgcctaatgcatcattctccactctgaagatccagccctcagaacccagggactcagctgtgtacttctgtgccagcagttcctccacagggggcaactatggctacaccttcggttcggggaccaggttaaccgttgtagaggacctgaacaaggtgttcccacccgaggtcgctgtgtttgagccatcagaagcagagatctcccacacccaaaaggccacactggtgtgcctggccacaggcttcttccctgaccacgtggagctgagctggtgggtgaatgggaaggaggtgcacagtggggtcagcacggacccgcagcccctcaaggagcagcccgccctcaatgactccagatactgcctgagcagccgcctgagggtctcggccaccttctggcagaacccccgcaaccacttccgctgtcaagtccagttctacgggctctcggagaatgacgagtggacccaggatagggccaaacccgtcacccagatcgtcagcgccgaggcctggggtagagcagactgtggctttacctcggtgtcctaccagcaaggggtcctgtctgccaccatcctctatgagatcctgctagggaaggccaccctgtatgctgtgctggtcagcgcccttgtgttgatggccatggtcaagagaaaggatttc

SEQ ID NO: 1301 - DNA, 933 bp, Homo sapiens
  TCR_83Beta chain
atgagcatcggcctcctgtgctgtgcagccttgtctctcctgtgggcaggtccagtgaatgctggtgtcactcagaccccaaaattccaggtcctgaagacaggacagagcatgacactgcagtgtgcccaggatatgaaccatgaatacatgtcctggtatcgacaagacccaggcatggggctgaggctgattcattactcagttggtgctggtatcactgaccaaggagaagtccccaatggctacaatgtctccagatcaaccacagaggatttcccgctcaggctgctgtcggctgctccctcccagacatctgtgtacttctgtgccagcagttaccatgccggggacaggggattcggctacaccttcggttcggggaccaggttaaccgttgtagaggacctgaacaaggtgttcccacccgaggtcgctgtgtttgagccatcagaagcagagatctcccacacccaaaaggccacactggtgtgcctggccacaggcttcttccctgaccacgtggagctgagctggtgggtgaatgggaaggaggtgcacagtggggtcagcacggacccgcagcccctcaaggagcagcccgccctcaatgactccagatactgcctgagcagccgcctgagggtctcggccaccttctggcagaacccccgcaaccacttccgctgtcaagtccagttctacgggctctcggagaatgacgagtggacccaggatagggccaaacccgtcacccagatcgtcagcgccgaggcctggggtagagcagactgtggctttacctcggtgtcctaccagcaaggggtcctgtctgccaccatcctctatgagatcctgctagggaaggccaccctgtatgctgtgctggtcagcgcccttgtgttgatggccatggtcaagagaaaggatttc

SEQ ID NO: 1302 - DNA, 930 bp, Homo sapiens
  TCR_84Beta chain
atgctgagtcttctgctccttctcctgggactaggctctgtgttcagtgctgtcatctctcaaaagccaagcagggatatctgtcaacgtggaacctccctgacgatccagtgtcaagtcgatagccaagtcaccatgatgttctggtaccgtcagcaacctggacagagcctgacactgatcgcaactgcaaatcagggctctgaggccacatatgagagtggatttgtcattgacaagtttcccatcagccgcccaaacctaacattctcaactctgactgtgagcaacatgagccctgaagacagcagcatatatctctgcagcgtagtggacaggggacgtttctacaatgagcagttcttcgggccagggacacggctcaccgtgctagaggacctgaaaaacgtgttcccacccaaggtcgctgtgtttgagccatcagaagcagagatctcccacacccaaaaggccacactggtgtgcctggccacaggcttctaccccgaccacgtggagctgagctggtgggtgaatgggaaggaggtgcacagtggggtcagcacagacccgcagcccctcaaggagcagcccgccctcaatgactccagatactgcctgagcagccgcctgagggtctcggccaccttctggcagaacccccgcaaccacttccgctgtcaagtccagttctacgggctctcggagaatgacgagtggacccaggatagggccaaacctgtcacccagatcgtcagcgccgaggcctggggtagagcagactgtggcttcacctccgagtcttaccagcaaggggtcctgtctgccaccatcctctatgagatcttgctagggaaggccaccttgtatgccgtgctggtcagtgccctcgtgctgatggccatggtcaagagaaaggattccagaggc

SEQ ID NO: 1303 - DNA, 945 bp, Homo sapiens; identical to SEQ ID NO: 1278
  TCR_85Beta chain

SEQ ID NO: 1304 - DNA, 948 bp, Homo sapiens
  TCR_86Beta chain
atggatacctggctcgtatgctgggcaatttttagtctcttgaaagcaggactcacagaacctgaagtcacccagactcccagccatcaggtcacacagatgggacaggaagtgatcttgcgctgtgtccccatctctaatcacttatacttctattggtacagacaaatcttggggcagaaagtcgagtttctggtttccttttataataatgaaatctcagagaagtctgaaatattcgatgatcaattctcagttgaaaggcctgatggatcaaatttcactctgaagatccggtccacaaagctggaggactcagccatgtacttctgtgccagcagtgaagcgctttcggggggagcacctgcggagacccagtacttcgggccaggcacgcggctcctggtgctcgaggacctgaaaaacgtgttcccacccaaggtcgctgtgtttgagccatcagaagcagagatctcccacacccaaaaggccacactggtgtgcctggccacaggcttctaccccgaccacgtggagctgagctggtgggtgaatgggaaggaggtgcacagtggggtcagcacagacccgcagcccctcaaggagcagcccgccctcaatgactccagatactgcctgagcagccgcctgagggtctcggccaccttctggcagaacccccgcaaccacttccgctgtcaagtccagttctacgggctctcggagaatgacgagtggacccaggatagggccaaacctgtcacccagatcgtcagcgccgaggcctggggtagagcagactgtggcttcacctccgagtcttaccagcaaggggtcctgtctgccaccatcctctatgagatcttgctagggaaggccaccttgtatgccgtgctggtcagtgccctcgtgctgatggccatggtcaagagaaaggattccagaggc

SEQ ID NO: 1305 - DNA, 936 bp, Homo sapiens
  TCR_87Beta chain
atggactcctggaccttctgctgtgtgtccctttgcatcctggtagcgaagcatacagatgctggagttatccagtcaccccgccatgaggtgacagagatgggacaagaagtgactctgagatgtaaaccaatttcaggccacaactcccttttctggtacagacagaccatgatgcggggactggagttgctcatttactttaacaacaacgttccgatagatgattcagggatgcccgaggatcgattctcagctaagatgcctaatgcatcattctccactctgaagatccagccctcagaacccagggactcagctgtgtacttctgtgccagctttcaggatcaaaacaccggggagctgttttttggagaaggctctaggctgaccgtactggaggacctgaaaaacgtgttcccacccaaggtcgctgtgtttgagccatcagaagcagagatctcccacacccaaaaggccacactggtgtgcctggccacaggcttctaccccgaccacgtggagctgagctggtgggtgaatgggaaggaggtgcacagtggggtcagcacagacccgcagcccctcaaggagcagcccgccctcaatgactccagatactgcctgagcagccgcctgagggtctcggccaccttctggcagaacccccgcaaccacttccgctgtcaagtccagttctacgggctctcggagaatgacgagtggacccaggatagggccaaacctgtcacccagatcgtcagcgccgaggcctggggtagagcagactgtggcttcacctccgagtcttaccagcaaggggtcctgtctgccaccatcctctatgagatcttgctagggaaggccaccttgtatgccgtgctggtcagtgccctcgtgctgatggccatggtcaagagaaaggattccagaggc

SEQ ID NO: 1306 - DNA, 939 bp, Homo sapiens
  TCR_88Beta chain
atgggctgcaggctgctctgctgtgcggttctctgtctcctgggagcggtccccatggaaacgggagttacgcagacaccaagacacctggtcatgggaatgacaaataagaagtctttgaaatgtgaacaacatctgggtcataacgctatgtattggtacaagcaaagtgctaagaagccactggagctcatgtttgtctacagtcttgaagaacgggttgaaaacaacagtgtgccaagtcgcttctcacctgaatgccccaacagctctcacttattccttcacctacacaccctgcagccagaagactcggccctgtatctctgcgccagcagcgcccaagagggacggatcgaaatgaacactgaagctttctttggacaaggcaccagactcacagttgtagaggacctgaacaaggtgttcccacccgaggtcgctgtgtttgagccatcagaagcagagatctcccacacccaaaaggccacactggtgtgcctggccacaggcttcttccctgaccacgtggagctgagctggtgggtgaatgggaaggaggtgcacagtggggtcagcacggacccgcagcccctcaaggagcagcccgccctcaatgactccagatactgcctgagcagccgcctgagggtctcggccaccttctggcagaacccccgcaaccacttccgctgtcaagtccagttctacgggctctcggagaatgacgagtggacccaggatagggccaaacccgtcacccagatcgtcagcgccgaggcctggggtagagcagactgtggctttacctcggtgtcctaccagcaaggggtcctgtctgccaccatcctctatgagatcctgctagggaaggccaccctgtatgctgtgctggtcagcgcccttgtgttgatggccatggtcaagagaaaggatttc

SEQ ID NO: 1307 - DNA, 936 bp, Homo sapiens
  TCR_89Beta chain
atgagcctcgggctcctgtgctgtggggtcttttctctcctgtgggcaggtccagtgaatgctggtgtcactcagaccccaaaattccgggtcctgaagacaggacagagcatgacactgctgtgtgcccaggatatgaaccatgaatacatgtactggtatcgacaagacccaggcatggggctgaggctgattcattactcagttggtgagggtacaactgccaaaggagaggtccctgatggctacaatgtctccagattaaaaaaacagaatttcctgctggggttggagtcggctgctccctcccaaacatctgtgtacttctgtgccagcagttacgtgacgggagcctcctacgagcagtacttcgggccgggcaccaggctcacggtcacagaggacctgaaaaacgtgttcccacccaaggtcgctgtgtttgagccatcagaagcagagatctcccacacccaaaaggccacactggtgtgcctggccacaggcttctaccccgaccacgtggagctgagctggtgggtgaatgggaaggaggtgcacagtggggtcagcacagacccgcagcccctcaaggagcagcccgccctcaatgactccagatactgcctgagcagccgcctgagggtctcggccaccttctggcagaacccccgcaaccacttccgctgtcaagtccagttctacgggctctcggagaatgacgagtggacccaggatagggccaaacctgtcacccagatcgtcagcgccgaggcctggggtagagcagactgtggcttcacctccgagtcttaccagcaaggggtcctgtctgccaccatcctctatgagatcttgctagggaaggccaccttgtatgccgtgctggtcagtgccctcgtgctgatggccatggtcaagagaaaggattccagaggc

SEQ ID NO: 1308 - DNA, 939 bp, Homo sapiens
  TCR_90Beta chain
atgggctgcaggctcctctgctgtgtggtcttctgcctcctccaagcaggtcccttggacacagctgtttcccagactccaaaatacctggtcacacagatgggaaacgacaagtccattaaatgtgaacaaaatctgggccatgatactatgtattggtataaacaggactctaagaaatttctgaagataatgtttagctacaataataaggagctcattataaatgaaacagttccaaatcgcttctcacctaaatctccagacaaagctcacttaaatcttcacatcaattccctggagcttggtgactctgctgtgtatttctgtgccagcagcccacctagcggggggaacaccggggagctgttttttggagaaggctctaggctgaccgtactggaggacctgaaaaacgtgttcccacccaaggtcgctgtgtttgagccatcagaagcagagatctcccacacccaaaaggccacactggtgtgcctggccacaggcttctaccccgaccacgtggagctgagctggtgggtgaatgggaaggaggtgcacagtggggtcagcacagacccgcagcccctcaaggagcagcccgccctcaatgactccagatactgcctgagcagccgcctgagggtctcggccaccttctggcagaacccccgcaaccacttccgctgtcaagtccagttctacgggctctcggagaatgacgagtggacccaggatagggccaaacctgtcacccagatcgtcagcgccgaggcctggggtagagcagactgtggcttcacctccgagtcttaccagcaaggggtcctgtctgccaccatcctctatgagatcttgctagggaaggccaccttgtatgccgtgctggtcagtgccctcgtgctgatggccatggtcaagagaaaggattccagaggc

SEQ ID NO: 1309 - DNA, 936 bp, Homo sapiens
  TCR_91Beta chain
atgggctcctggaccctctgctgtgtgtccctttgcatcctggtagcaaagcacacagatgctggagttatccagtcaccccggcacgaggtgacagagatgggacaagaagtgactctgagatgtaaaccaatttcaggacatgactaccttttctggtacagacagaccatgatgcggggactggagttgctcatttactttaacaacaacgttccgatagatgattcagggatgcccgaggatcgattctcagctaagatgcctaatgcatcattctccactctgaagatccagccctcagaacccagggactcagctgtgtacttctgtgccagcagtacgggatcaaacaccggggagctgttttttggagaaggctctaggctgaccgtactggaggacctgaaaaacgtgttcccacccaaggtcgctgtgtttgagccatcagaagcagagatctcccacacccaaaaggccacactggtgtgcctggccacaggcttctaccccgaccacgtggagctgagctggtgggtgaatgggaaggaggtgcacagtggggtcagcacagacccgcagcccctcaaggagcagcccgccctcaatgactccagatactgcctgagcagccgcctgagggtctcggccaccttctggcagaacccccgcaaccacttccgctgtcaagtccagttctacgggctctcggagaatgacgagtggacccaggatagggccaaacctgtcacccagatcgtcagcgccgaggcctggggtagagcagactgtggcttcacctccgagtcttaccagcaaggggtcctgtctgccaccatcctctatgagatcttgctagggaaggccaccttgtatgccgtgctggtcagtgccctcgtgctgatggccatggtcaagagaaaggattccagaggc

SEQ ID NO: 1310 - DNA, 921 bp, Homo sapiens
  TCR_92Beta chain
atgagcaaccaggtgctctgctgtgtggtcctttgtttcctgggagcaaacaccgtggatggtggaatcactcagtccccaaagtacctgttcagaaaggaaggacagaatgtgaccctgagttgtgaacagaatttgaaccacgatgccatgtactggtaccgacaggacccagggcaagggctgagattgatctactactcacagatagtaaatgactttcagaaaggagatatagctgaagggtacagcgtctctcgggagaagaaggaatcctttcctctcactgtgacatcggcccaaaagaacccgacagctttctatctctgtgccagtagtatcggatcaagggaggctttctttggacaaggcaccagactcacagttgtagaggacctgaacaaggtgttcccacccgaggtcgctgtgtttgagccatcagaagcagagatctcccacacccaaaaggccacactggtgtgcctggccacaggcttcttccctgaccacgtggagctgagctggtgggtgaatgggaaggaggtgcacagtggggtcagcacggacccgcagcccctcaaggagcagcccgccctcaatgactccagatactgcctgagcagccgcctgagggtctcggccaccttctggcagaacccccgcaaccacttccgctgtcaagtccagttctacgggctctcggagaatgacgagtggacccaggatagggccaaacccgtcacccagatcgtcagcgccgaggcctggggtagagcagactgtggctttacctcggtgtcctaccagcaaggggtcctgtctgccaccatcctctatgagatcctgctagggaaggccaccctgtatgctgtgctggtcagcgcccttgtgttgatggccatggtcaagagaaaggatttc

SEQ ID NO: 1311 - DNA, 936 bp, Homo sapiens
  TCR_93Beta chain
atgggctccaggctgctctgttgggtgctgctttgtctcctgggagcaggcccagtaaaggctggagtcactcaaactccaagatatctgatcaaaacgagaggacagcaagtgacactgagctgctcccctatctctgggcataggagtgtatcctggtaccaacagaccccaggacagggccttcagttcctctttgaatacttcagtgagacacagagaaacaaaggaaacttccctggtcgattctcagggcgccagttctctaactctcgctctgagatgaatgtgagcaccttggagctgggggactcggccctttatctttgcgccagcagcagcaggacagcgccctcagatacgcagtattttggcccaggcacccggctgacagtgctcgaggacctgaaaaacgtgttcccacccaaggtcgctgtgtttgagccatcagaagcagagatctcccacacccaaaaggccacactggtgtgcctggccacaggcttctaccccgaccacgtggagctgagctggtgggtgaatgggaaggaggtgcacagtggggtcagcacagacccgcagcccctcaaggagcagcccgccctcaatgactccagatactgcctgagcagccgcctgagggtctcggccaccttctggcagaacccccgcaaccacttccgctgtcaagtccagttctacgggctctcggagaatgacgagtggacccaggatagggccaaacctgtcacccagatcgtcagcgccgaggcctggggtagagcagactgtggcttcacctccgagtcttaccagcaaggggtcctgtctgccaccatcctctatgagatcttgctagggaaggccaccttgtatgccgtgctggtcagtgccctcgtgctgatggccatggtcaagagaaaggattccagaggc

SEQ ID NO: 1312 - DNA, 936 bp, Homo sapiens
  TCR_94Beta chain
atgagcctcgggctcctgtgctgtggggccttttctctcctgtgggcaggtccagtgaatgctggtgtcactcagaccccaaaattccgggtcctgaagacaggacagagcatgacactgctgtgtgcccaggatatgaaccatgaatacatgtactggtatcgacaagacccaggcatggggctgaggctgattcattactcagttggtgagggtacaactgccaaaggagaggtccctgatggctacaatgtctccagattaaaaaaacagaatttcctgctggggttggagtcggctgctccctcccaaacatctgtgtacttctgtgccagcagcccgactagcgggagtcgggagacccagtacttcgggccaggcacgcggctcctggtgctcgaggacctgaaaaacgtgttcccacccaaggtcgctgtgtttgagccatcagaagcagagatctcccacacccaaaaggccacactggtgtgcctggccacaggcttctaccccgaccacgtggagctgagctggtgggtgaatgggaaggaggtgcacagtggggtcagcacagacccgcagcccctcaaggagcagcccgccctcaatgactccagatactgcctgagcagccgcctgagggtctcggccaccttctggcagaacccccgcaaccacttccgctgtcaagtccagttctacgggctctcggagaatgacgagtggacccaggatagggccaaacctgtcacccagatcgtcagcgccgaggcctggggtagagcagactgtggcttcacctccgagtcttaccagcaaggggtcctgtctgccaccatcctctatgagatcttgctagggaaggccaccttgtatgccgtgctggtcagtgccctcgtgctgatggccatggtcaagagaaaggattccagaggc

SEQ ID NO: 1313 - DNA, 930 bp, Homo sapiens
  TCR_95Beta chain
atgggtcctgggcttctccactggatggccctttgtctccttggaacaggtcatggggatgccatggtcatccagaacccaagataccaggttacccagtttggaaagccagtgaccctgagttgttctcagactttgaaccataacgtcatgtactggtaccagcagaagtcaagtcaggccccaaagctgctgttccactactatgacaaagattttaacaatgaagcagacacccctgataacttccaatccaggaggccgaacacttctttctgctttcttgacatccgctcaccaggcctgggggacgcagccatgtacctgtgtgccacccagaacctgaacaccggggagctgttttttggagaaggctctaggctgaccgtactggaggacctgaaaaacgtgttcccacccaaggtcgctgtgtttgagccatcagaagcagagatctcccacacccaaaaggccacactggtgtgcctggccacaggcttctaccccgaccacgtggagctgagctggtgggtgaatgggaaggaggtgcacagtggggtcagcacagacccgcagcccctcaaggagcagcccgccctcaatgactccagatactgcctgagcagccgcctgagggtctcggccaccttctggcagaacccccgcaaccacttccgctgtcaagtccagttctacgggctctcggagaatgacgagtggacccaggatagggccaaacctgtcacccagatcgtcagcgccgaggcctggggtagagcagactgtggcttcacctccgagtcttaccagcaaggggtcctgtctgccaccatcctctatgagatcttgctagggaaggccaccttgtatgccgtgctggtcagtgccctcgtgctgatggccatggtcaagagaaaggattccagaggc

SEQ ID NO: 1314 - DNA, 933 bp, Homo sapiens
  TCR_96Beta chain
atgggcaccagcctcctctgctggatggccctgtgtctcctgggggcagatcacgcagatactggagtctcccagaaccccagacacaagatcacaaagaggggacagaatgtaactttcaggtgtgatccaatttctgaacacaaccgcctttattggtaccgacagaccctggggcagggcccagagtttctgacttacttccagaatgaagctcaactagaaaaatcaaggctgctcagtgatcggttctctgcagagaggcctaagggatctttctccaccttggagatccagcgcacagagcagggggactcggccatgtatctctgtgccggatcgactagcctcaccggggagctgttttttggagaaggctctaggctgaccgtactggaggacctgaaaaacgtgttcccacccaaggtcgctgtgtttgagccatcagaagcagagatctcccacacccaaaaggccacactggtgtgcctggccacaggcttctaccccgaccacgtggagctgagctggtgggtgaatgggaaggaggtgcacagtggggtcagcacagacccgcagcccctcaaggagcagcccgccctcaatgactccagatactgcctgagcagccgcctgagggtctcggccaccttctggcagaacccccgcaaccacttccgctgtcaagtccagttctacgggctctcggagaatgacgagtggacccaggatagggccaaacctgtcacccagatcgtcagcgccgaggcctggggtagagcagactgtggcttcacctccgagtcttaccagcaaggggtcctgtctgccaccatcctctatgagatcttgctagggaaggccaccttgtatgccgtgctggtcagtgccctcgtgctgatggccatggtcaagagaaaggattccagaggc

SEQ ID NO: 1315 - DNA, 930 bp, Homo sapiens
  TCR_97Beta chain
atgggctccaggctgctctgttgggtgctgctttgtctcctgggagcaggcccagtaaaggctggagtcactcaaactccaagatatctgatcaaaacgagaggacagcaagtgacactgagctgctcccctatctctgggcataggagtgtatcctggtaccaacagaccccaggacagggccttcagttcctctttgaatacttcagtgagacacagagaaacaaaggaaacttccctggtcgattctcagggcgccagttctctaactctcgctctgagatgaatgtgagcaccttggagctgggggactcggccctttatctttgcgccagcagcttggcggggggctggggcactgaagctttctttggacaaggcaccagactcacagttgtagaggacctgaacaaggtgttcccacccgaggtcgctgtgtttgagccatcagaagcagagatctcccacacccaaaaggccacactggtgtgcctggccacaggcttcttccctgaccacgtggagctgagctggtgggtgaatgggaaggaggtgcacagtggggtcagcacggacccgcagcccctcaaggagcagcccgccctcaatgactccagatactgcctgagcagccgcctgagggtctcggccaccttctggcagaacccccgcaaccacttccgctgtcaagtccagttctacgggctctcggagaatgacgagtggacccaggatagggccaaacccgtcacccagatcgtcagcgccgaggcctggggtagagcagactgtggctttacctcggtgtcctaccagcaaggggtcctgtctgccaccatcctctatgagatcctgctagggaaggccaccctgtatgctgtgctggtcagcgcccttgtgttgatggccatggtcaagagaaaggatttc

SEQ ID NO: 1316 - DNA, 945 bp, Homo sapiens
  TCR_98Beta chain
atgggcccccagctccttggctatgtggtcctttgccttctaggagcaggccccctggaagcccaagtgacccagaacccaagatacctcatcacagtgactggaaagaagttaacagtgacttgttctcagaatatgaaccatgagtatatgtcctggtatcgacaagacccagggctgggcttaaggcagatctactattcaatgaatgttgaggtgactgataagggagatgttcctgaagggtacaaagtctctcgaaaagagaagaggaatttccccctgatcctggagtcgcccagccccaaccagacctctctgtacttctgtgccagcagacctttgacagggggcccactagccaaaaacattcagtacttcggcgccgggacccggctctcagtgctggaggacctgaaaaacgtgttcccacccaaggtcgctgtgtttgagccatcagaagcagagatctcccacacccaaaaggccacactggtgtgcctggccacaggcttctaccccgaccacgtggagctgagctggtgggtgaatgggaaggaggtgcacagtggggtcagcacagacccgcagcccctcaaggagcagcccgccctcaatgactccagatactgcctgagcagccgcctgagggtctcggccaccttctggcagaacccccgcaaccacttccgctgtcaagtccagttctacgggctctcggagaatgacgagtggacccaggatagggccaaacctgtcacccagatcgtcagcgccgaggcctggggtagagcagactgtggcttcacctccgagtcttaccagcaaggggtcctgtctgccaccatcctctatgagatcttgctagggaaggccaccttgtatgccgtgctggtcagtgccctcgtgctgatggccatggtcaagagaaaggattccagaggc

SEQ ID NO: 1317 - DNA, 945 bp, Homo sapiens
  TCR_99Beta chain
atggtttccaggcttctcagtttagtgtccctttgtctcctgggagcaaagcacatagaagctggagttactcagttccccagccacagcgtaatagagaagggccagactgtgactctgagatgtgacccaatttctggacatgataatctttattggtatcgacgtgttatgggaaaagaaataaaatttctgttacattttgtgaaagagtctaaacaggatgagtccggtatgcccaacaatcgattcttagctgaaaggactggagggacgtattctactctgaaggtgcagcctgcagaactggaggattctggagtttatttctgtgccagcagccaaggtgattacaggtcatctacctacgagcagtacttcgggccgggcaccaggctcacggtcacagaggacctgaaaaacgtgttcccacccaaggtcgctgtgtttgagccatcagaagcagagatctcccacacccaaaaggccacactggtgtgcctggccacaggcttctaccccgaccacgtggagctgagctggtgggtgaatgggaaggaggtgcacagtggggtcagcacagacccgcagcccctcaaggagcagcccgccctcaatgactccagatactgcctgagcagccgcctgagggtctcggccaccttctggcagaacccccgcaaccacttccgctgtcaagtccagttctacgggctctcggagaatgacgagtggacccaggatagggccaaacctgtcacccagatcgtcagcgccgaggcctggggtagagcagactgtggcttcacctccgagtcttaccagcaaggggtcctgtctgccaccatcctctatgagatcttgctagggaaggccaccttgtatgccgtgctggtcagtgccctcgtgctgatggccatggtcaagagaaaggattccagaggc

SEQ ID NO: 1318 - DNA, 933 bp, Homo sapiens
  TCR_100Beta chain
atggacaccagagtactctgctgtgcggtcatctgtcttctgggggcaggtctctcaaatgccggcgtcatgcagaacccaagacacctggtcaggaggaggggacaggaggcaagactgagatgcagcccaatgaaaggacacagtcatgtttactggtatcggcagctcccagaggaaggtctgaaattcatggtttatctccagaaagaaaatatcatagatgagtcaggaatgccaaaggaacgattttctgctgaatttcccaaagagggccccagcatcctgaggatccagcaggtagtgcgaggagattcggcagcttatttctgtgccagctcaacaacagggggagaggagcagttcttcgggccagggacacggctcaccgtgctagaggacctgaaaaacgtgttcccacccaaggtcgctgtgtttgagccatcagaagcagagatctcccacacccaaaaggccacactggtgtgcctggccacaggcttctaccccgaccacgtggagctgagctggtgggtgaatgggaaggaggtgcacagtggggtcagcacagacccgcagcccctcaaggagcagcccgccctcaatgactccagatactgcctgagcagccgcctgagggtctcggccaccttctggcagaacccccgcaaccacttccgctgtcaagtccagttctacgggctctcggagaatgacgagtggacccaggatagggccaaacctgtcacccagatcgtcagcgccgaggcctggggtagagcagactgtggcttcacctccgagtcttaccagcaaggggtcctgtctgccaccatcctctatgagatcttgctagggaaggccaccttgtatgccgtgctggtcagtgccctcgtgctgatggccatggtcaagagaaaggattccagaggc

SEQ ID NO: 1319 - DNA, 933 bp, Homo sapiens; identical to SEQ ID NO: 1318
  TCR_101Beta chain

SEQ ID NO: 1320 - DNA, 930 bp, Homo sapiens
  TCR_102Beta chain
atgggtcctgggcttctccactggatggccctttgtctccttggaacaggtcatggggatgccatggtcatccagaacccaagataccaggttacccagtttggaaagccagtgaccctgagttgttctcagactttgaaccataacgtcatgtactggtaccagcagaagtcaagtcaggccccaaagctgctgttccactactatgacaaagattttaacaatgaagcagacacccctgataacttccaatccaggaggccgaacacttctttctgctttcttgacatccgctcaccaggcctgggggacgcagccatgtacctgtgtgccaccacagacttagactccggggagctgttttttggagaaggctctaggctgaccgtactggaggacctgaaaaacgtgttcccacccaaggtcgctgtgtttgagccatcagaagcagagatctcccacacccaaaaggccacactggtgtgcctggccacaggcttctaccccgaccacgtggagctgagctggtgggtgaatgggaaggaggtgcacagtggggtcagcacagacccgcagcccctcaaggagcagcccgccctcaatgactccagatactgcctgagcagccgcctgagggtctcggccaccttctggcagaacccccgcaaccacttccgctgtcaagtccagttctacgggctctcggagaatgacgagtggacccaggatagggccaaacctgtcacccagatcgtcagcgccgaggcctggggtagagcagactgtggcttcacctccgagtcttaccagcaaggggtcctgtctgccaccatcctctatgagatcttgctagggaaggccaccttgtatgccgtgctggtcagtgccctcgtgctgatggccatggtcaagagaaaggattccagaggc

SEQ ID NO: 1321 - DNA, 933 bp, Homo sapiens
  TCR_103Beta chain
atggactcctggaccttctgctgtgtgtccctttgcatcctggtagcgaagcatacagatgctggagttatccagtcaccccgccatgaggtgacagagatgggacaagaagtgactctgagatgtaaaccaatttcaggccacaactcccttttctggtacagacagaccatgatgcggggactggagttgctcatttactttaacaacaacgttccgatagatgattcagggatgcccgaggatcgattctcagctaagatgcctaatgcatcattctccactctgaagatccagccctcagaacccagggactcagctgtgtacttctgtgccagacaagacagtaacaccggggagctgttttttggagaaggctctaggctgaccgtactggaggacctgaaaaacgtgttcccacccaaggtcgctgtgtttgagccatcagaagcagagatctcccacacccaaaaggccacactggtgtgcctggccacaggcttctaccccgaccacgtggagctgagctggtgggtgaatgggaaggaggtgcacagtggggtcagcacagacccgcagcccctcaaggagcagcccgccctcaatgactccagatactgcctgagcagccgcctgagggtctcggccaccttctggcagaacccccgcaaccacttccgctgtcaagtccagttctacgggctctcggagaatgacgagtggacccaggatagggccaaacctgtcacccagatcgtcagcgccgaggcctggggtagagcagactgtggcttcacctccgagtcttaccagcaaggggtcctgtctgccaccatcctctatgagatcttgctagggaaggccaccttgtatgccgtgctggtcagtgccctcgtgctgatggccatggtcaagagaaaggattccagaggc

SEQ ID NO: 1322 - DNA, 936 bp, Homo sapiens
  TCR_104Beta chain
atgggccccgggctcctctgctgggcactgctttgtctcctgggagcaggcttagtggacgctggagtcacccaaagtcccacacacctgatcaaaacgagaggacagcaagtgactctgagatgctctcctaagtctgggcatgacactgtgtcctggtaccaacaggccctgggtcaggggccccagtttatctttcagtattatgaggaggaagagagacagagaggcaacttccctgatcgattctcaggtcaccagttccctaactatagctctgagctgaatgtgaacgccttgttgctgggggactcggccctctatctctgtgccagcagctcgatatggactagcgtcaatgagcagttcttcgggccagggacacggctcaccgtgctagaggacctgaaaaacgtgttcccacccaaggtcgctgtgtttgagccatcagaagcagagatctcccacacccaaaaggccacactggtgtgcctggccacaggcttctaccccgaccacgtggagctgagctggtgggtgaatgggaaggaggtgcacagtggggtcagcacagacccgcagcccctcaaggagcagcccgccctcaatgactccagatactgcctgagcagccgcctgagggtctcggccaccttctggcagaacccccgcaaccacttccgctgtcaagtccagttctacgggctctcggagaatgacgagtggacccaggatagggccaaacctgtcacccagatcgtcagcgccgaggcctggggtagagcagactgtggcttcacctccgagtcttaccagcaaggggtcctgtctgccaccatcctctatgagatcttgctagggaaggccaccttgtatgccgtgctggtcagtgccctcgtgctgatggccatggtcaagagaaaggattccagaggc

SEQ ID NO: 1323 - DNA, 927 bp, Homo sapiens
  TCR_105Beta chain
atgagcaaccaggtgctctgctgtgtggtcctttgtctcctgggagcaaacaccgtggatggtggaatcactcagtccccgaagtacctgttcagaaaggaaggacagaatgtgaccctgagttgtgaacagaatttgaaccacgatgccatgtactggtaccgacaggacccagggcaagggctgagattgatctactactcacagatagtaaatgactttcagaaaggagatatagctgaagggtacagcgtctctcgggagaagaaggaatcctttcctctcactgtgacatcggcccaaaagaacccgacagctttctatctctgtgccagtagtctcgtgtccggggagctgttttttggagaaggctctaggctgaccgtactggaggacctgaaaaacgtgttcccacccaaggtcgctgtgtttgagccatcagaagcagagatctcccacacccaaaaggccacactggtgtgcctggccacaggcttctaccccgaccacgtggagctgagctggtgggtgaatgggaaggaggtgcacagtggggtcagcacagacccgcagcccctcaaggagcagcccgccctcaatgactccagatactgcctgagcagccgcctgagggtctcggccaccttctggcagaacccccgcaaccacttccgctgtcaagtccagttctacgggctctcggagaatgacgagtggacccaggatagggccaaacctgtcacccagatcgtcagcgccgaggcctggggtagagcagactgtggcttcacctccgagtcttaccagcaaggggtcctgtctgccaccatcctctatgagatcttgctagggaaggccaccttgtatgccgtgctggtcagtgccctcgtgctgatggccatggtcaagagaaaggattccagaggc

SEQ ID NO: 1324 - DNA, 939 bp, Homo sapiens
  TCR_106Beta chain
atggatacctggctcgtatgctgggcaatttttagtctcttgaaagcaggactcacagaacctgaagtcacccagactcccagccatcaggtcacacagatgggacaggaagtgatcttgcgctgtgtccccatctctaatcacttatacttctattggtacagacaaatcttggggcagaaagtcgagtttctggtttccttttataataatgaaatctcagagaagtctgaaatattcgatgatcaattctcagttgaaaggcctgatggatcaaatttcactctgaagatccggtccacaaagctggaggactcagccatgtacttctgtgccaaactagtgacgggggcagtatctggtgagcagttcttcgggccagggacacggctcaccgtgctagaggacctgaaaaacgtgttcccacccaaggtcgctgtgtttgagccatcagaagcagagatctcccacacccaaaaggccacactggtgtgcctggccacaggcttctaccccgaccacgtggagctgagctggtgggtgaatgggaaggaggtgcacagtggggtcagcacagacccgcagcccctcaaggagcagcccgccctcaatgactccagatactgcctgagcagccgcctgagggtctcggccaccttctggcagaacccccgcaaccacttccgctgtcaagtccagttctacgggctctcggagaatgacgagtggacccaggatagggccaaacctgtcacccagatcgtcagcgccgaggcctggggtagagcagactgtggcttcacctccgagtcttaccagcaaggggtcctgtctgccaccatcctctatgagatcttgctagggaaggccaccttgtatgccgtgctggtcagtgccctcgtgctgatggccatggtcaagagaaaggattccagaggc

SEQ ID NO: 1325 - DNA, 924 bp, Homo sapiens
  TCR_107Beta chain
atgggctccaggctgctctgttgggtgctgctttgtctcctgggagcaggcccagtaaaggctggagtcactcaaactccaagatatctgatcaaaacgagaggacagcaagtgacactgagctgctcccctatctctgggcataggagtgtatcctggtaccaacagaccccaggacagggccttcagttcctctttgaatacttcagtgagacacagagaaacaaaggaaacttccctggtcgattctcagggcgccagttctctaactctcgctctgagatgaatgtgagcaccttggagctgggggactcggccctttatctttgcgccagcagcttggcaggggcgcagcaagctttctttggacaaggcaccagactcacagttgtagaggacctgaacaaggtgttcccacccgaggtcgctgtgtttgagccatcagaagcagagatctcccacacccaaaaggccacactggtgtgcctggccacaggcttcttccctgaccacgtggagctgagctggtgggtgaatgggaaggaggtgcacagtggggtcagcacggacccgcagcccctcaaggagcagcccgccctcaatgactccagatactgcctgagcagccgcctgagggtctcggccaccttctggcagaacccccgcaaccacttccgctgtcaagtccagttctacgggctctcggagaatgacgagtggacccaggatagggccaaacccgtcacccagatcgtcagcgccgaggcctggggtagagcagactgtggctttacctcggtgtcctaccagcaaggggtcctgtctgccaccatcctctatgagatcctgctagggaaggccaccctgtatgctgtgctggtcagcgcccttgtgttgatggccatggtcaagagaaaggatttc

SEQ ID NO: 1326 - DNA, 936 bp, Homo sapiens
  TCR_108Beta chain
atgggctccaggctgctctgttgggtgctgctttgtctcctgggagcaggcccagtaaaggctggagtcactcaaactccaagatatctgatcaaaacgagaggacagcaagtgacactgagctgctcccctatctctgggcataggagtgtatcctggtaccaacagaccccaggacagggccttcagttcctctttgaatacttcagtgagacacagagaaacaaaggaaacttccctggtcgattctcagggcgccagttctctaactctcgctctgagatgaatgtgagcaccttggagctgggggactcggccctttatctttgcgccagcagctccgccgcgcggaccgggaatgagcagttcttcgggccagggacacggctcaccgtgctagaggacctgaaaaacgtgttcccacccaaggtcgctgtgtttgagccatcagaagcagagatctcccacacccaaaaggccacactggtgtgcctggccacaggcttctaccccgaccacgtggagctgagctggtgggtgaatgggaaggaggtgcacagtggggtcagcacagacccgcagcccctcaaggagcagcccgccctcaatgactccagatactgcctgagcagccgcctgagggtctcggccaccttctggcagaacccccgcaaccacttccgctgtcaagtccagttctacgggctctcggagaatgacgagtggacccaggatagggccaaacctgtcacccagatcgtcagcgccgaggcctggggtagagcagactgtggcttcacctccgagtcttaccagcaaggggtcctgtctgccaccatcctctatgagatcttgctagggaaggccaccttgtatgccgtgctggtcagtgccctcgtgctgatggccatggtcaagagaaaggattccagaggc

SEQ ID NO: 1327 - protein, 15 aa, Artificial Sequence
  Description of Artificial Sequence: Synthetic peptide
  SARS-CoV-2 epitope
PLVSSQCVNLTTRTQ

SEQ ID NO: 1328 - protein, 15 aa, Artificial Sequence
  Description of Artificial Sequence: Synthetic peptide
  SARS-CoV-2 epitope
PAYTNSFTRGVYYPD

SEQ ID NO: 1329 - protein, 15 aa, Artificial Sequence
  Description of Artificial Sequence: Synthetic peptide
  SARS-CoV-2 epitope
DKVFRSSVLHSTQDL

SEQ ID NO: 1330 - protein, 15 aa, Artificial Sequence
  Description of Artificial Sequence: Synthetic peptide
  SARS-CoV-2 epitope
FRSSVLHSTQDLFLP

SEQ ID NO: 1331 - protein, 15 aa, Artificial Sequence
  Description of Artificial Sequence: Synthetic peptide
  SARS-CoV-2 epitope
PFFSNVTWFHAIHVS

SEQ ID NO: 1332 - protein, 15 aa, Artificial Sequence
  Description of Artificial Sequence: Synthetic peptide
  SARS-CoV-2 epitope
NVTWFHAIHVSGTNG

SEQ ID NO: 1333 - protein, 15 aa, Artificial Sequence
  Description of Artificial Sequence: Synthetic peptide
  SARS-CoV-2 epitope
GVYFASTEKSNIIRG

SEQ ID NO: 1334 - protein, 15 aa, Artificial Sequence
  Description of Artificial Sequence: Synthetic peptide
  SARS-CoV-2 epitope
DSKTQSLLIVNNATN

SEQ ID NO: 1335 - protein, 15 aa, Artificial Sequence
  Description of Artificial Sequence: Synthetic peptide
  SARS-CoV-2 epitope
SLLIVNNATNVVIKV

SEQ ID NO: 1336 - protein, 15 aa, Artificial Sequence
  Description of Artificial Sequence: Synthetic peptide
  SARS-CoV-2 epitope
IYSKHTPINLVRDLP

SEQ ID NO: 1337 - protein, 15 aa, Artificial Sequence
  Description of Artificial Sequence: Synthetic peptide
  SARS-CoV-2 epitope
LPIGINITRFQTLLA

SEQ ID NO: 1338 - protein, 15 aa, Artificial Sequence
  Description of Artificial Sequence: Synthetic peptide
  SARS-CoV-2 epitope
TLLALHRSYLTPGDS

SEQ ID NO: 1339 - protein, 15 aa, Artificial Sequence
  Description of Artificial Sequence: Synthetic peptide
  SARS-CoV-2 epitope
VGYLQPRTFLLKYNE

SEQ ID NO: 1340 - protein, 17 aa, Artificial Sequence
  Description of Artificial Sequence: Synthetic peptide
  SARS-CoV-2 epitope
TVEKGIYQTSNFRVQPT

SEQ ID NO: 1341 - protein, 15 aa, Artificial Sequence
  Description of Artificial Sequence: Synthetic peptide
  SARS-CoV-2 epitope
NFRVQPTESIVRFPN

SEQ ID NO: 1342 - protein, 15 aa, Artificial Sequence
  Description of Artificial Sequence: Synthetic peptide
  SARS-CoV-2 epitope
NFRVQPTESIVRFPN

SEQ ID NO: 1343 - protein, 15 aa, Artificial Sequence
  Description of Artificial Sequence: Synthetic peptide
  SARS-CoV-2 epitope
NVYADSFVIRGDEVR

SEQ ID NO: 1344 - protein, 15 aa, Artificial Sequence
  Description of Artificial Sequence: Synthetic peptide
  SARS-CoV-2 epitope
FNFNGLTGTGVLTES

SEQ ID NO: 1345 - protein, 15 aa, Artificial Sequence
  Description of Artificial Sequence: Synthetic peptide
  SARS-CoV-2 epitope
IYQAGSTPCNGVEGF

SEQ ID NO: 1346 - protein, 15 aa, Artificial Sequence
  Description of Artificial Sequence: Synthetic peptide
  SARS-CoV-2 epitope
NLVKNKCVNFNFNGL

SEQ ID NO: 1347 - protein, 15 aa, Artificial Sequence
  Description of Artificial Sequence: Synthetic peptide
  SARS-CoV-2 epitope
FNFNGLTGTGVLTES

SEQ ID NO: 1348 - protein, 15 aa, Artificial Sequence
  Description of Artificial Sequence: Synthetic peptide
  SARS-CoV-2 epitope
TWRVYSTGSNVFQTR

SEQ ID NO: 1349 - protein, 15 aa, Artificial Sequence
  Description of Artificial Sequence: Synthetic peptide
  SARS-CoV-2 epitope
NSPRRARSVASQSII

SEQ ID NO: 1350 - protein, 15 aa, Artificial Sequence
  Description of Artificial Sequence: Synthetic peptide
  SARS-CoV-2 epitope
ASQSIIAYTMSLGAE

SEQ ID NO: 1351 - protein, 15 aa, Artificial Sequence
  Description of Artificial Sequence: Synthetic peptide
  SARS-CoV-2 epitope
ENSVAYSNNSIAIPT

SEQ ID NO: 1352 - protein, 15 aa, Artificial Sequence
  Description of Artificial Sequence: Synthetic peptide
  SARS-CoV-2 epitope
AQVKQIYKTPPIKDF

SEQ ID NO: 1353 - protein, 15 aa, Artificial Sequence
  Description of Artificial Sequence: Synthetic peptide
  SARS-CoV-2 epitope
FNKVTLADAGFIKQY

SEQ ID NO: 1354 - protein, 15 aa, Artificial Sequence
  Description of Artificial Sequence: Synthetic peptide
  SARS-CoV-2 epitope
QKFNGLTVLPPLLTD

SEQ ID NO: 1355 - protein, 15 aa, Artificial Sequence
  Description of Artificial Sequence: Synthetic peptide
  SARS-CoV-2 epitope
AQYTSALLAGTITSG

SEQ ID NO: 1356 - protein, 15 aa, Artificial Sequence
  Description of Artificial Sequence: Synthetic peptide
  SARS-CoV-2 epitope
PFAMQMAYRFNGIGV

SEQ ID NO: 1357 - protein, 15 aa, Artificial Sequence
  Description of Artificial Sequence: Synthetic peptide
  SARS-CoV-2 epitope
FNGIGVTQNVLYENQ

SEQ ID NO: 1358 - protein, 15 aa, Artificial Sequence
  Description of Artificial Sequence: Synthetic peptide
  SARS-CoV-2 epitope
IANQFNSAIGKIQDS

SEQ ID NO: 1359 - protein, 15 aa, Artificial Sequence
  Description of Artificial Sequence: Synthetic peptide
  SARS-CoV-2 epitope
DSLSSTASALGKLQD

SEQ ID NO: 1360 - protein, 15 aa, Artificial Sequence
  Description of Artificial Sequence: Synthetic peptide
  SARS-CoV-2 epitope
TQQLIRAAEIRASAN

SEQ ID NO: 1361 - protein, 15 aa, Artificial Sequence
  Description of Artificial Sequence: Synthetic peptide
  SARS-CoV-2 epitope
AEIRASANLAATKMS

SEQ ID NO: 1362 - protein, 15 aa, Artificial Sequence
  Description of Artificial Sequence: Synthetic peptide
  SARS-CoV-2 epitope
ANLAATKMSECVLGQ

SEQ ID NO: 1363 - protein, 15 aa, Artificial Sequence
  Description of Artificial Sequence: Synthetic peptide
  SARS-CoV-2 epitope
KYFKNHTSPDVDLGD

SEQ ID NO: 1364 - protein, 15 aa, Artificial Sequence
  Description of Artificial Sequence: Synthetic peptide
  SARS-CoV-2 epitope
GAVILRGHLRIAGHH

SEQ ID NO: 1365 - protein, 15 aa, Artificial Sequence
  Description of Artificial Sequence: Synthetic peptide
  SARS-CoV-2 epitope
AVILRGHLRIAGHHL

SEQ ID NO: 1366 - protein, 15 aa, Artificial Sequence
  Description of Artificial Sequence: Synthetic peptide
  SARS-CoV-2 epitope
VILRGHLRIAGHHLG

SEQ ID NO: 1367 - protein, 15 aa, Artificial Sequence
  Description of Artificial Sequence: Synthetic peptide
  SARS-CoV-2 epitope
ILRGHLRIAGHHLGR

SEQ ID NO: 1368 - protein, 15 aa, Artificial Sequence
  Description of Artificial Sequence: Synthetic peptide
  SARS-CoV-2 epitope
LRGHLRIAGHHLGRC

SEQ ID NO: 1369 - protein, 20 aa, Artificial Sequence
  Description of Artificial Sequence: Synthetic peptide
  SARS-CoV-2 epitope
RGHLRIAGHHLGRCDIKDLP

SEQ ID NO: 1370 - protein, 15 aa, Artificial Sequence
  Description of Artificial Sequence: Synthetic peptide
  SARS-CoV-2 epitope
GHLRIAGHHLGRCDI

SEQ ID NO: 1371 - protein, 15 aa, Artificial Sequence
  Description of Artificial Sequence: Synthetic peptide
  SARS-CoV-2 epitope
HLRIAGHHLGRCDIK

SEQ ID NO: 1372 - protein, 15 aa, Artificial Sequence
  Description of Artificial Sequence: Synthetic peptide
  SARS-CoV-2 epitope
LRIAGHHLGRCDIKD

SEQ ID NO: 1373 - protein, 15 aa, Artificial Sequence
  Description of Artificial Sequence: Synthetic peptide
  SARS-CoV-2 epitope
GMEVTPSGTWLTYTG

SEQ ID NO: 1374 - protein, 15 aa, Artificial Sequence
  Description of Artificial Sequence: Synthetic peptide
  SARS-CoV-2 epitope
MEVTPSGTWLTYTGA

SEQ ID NO: 1375 - protein, 15 aa, Artificial Sequence
  Description of Artificial Sequence: Synthetic peptide
  SARS-CoV-2 epitope
EVTPSGTWLTYTGAI

SEQ ID NO: 1376 - protein, 15 aa, Artificial Sequence
  Description of Artificial Sequence: Synthetic peptide
  SARS-CoV-2 epitope
VTPSGTWLTYTGAIK

SEQ ID NO: 1377 - protein, 15 aa, Artificial Sequence
  Description of Artificial Sequence: Synthetic peptide
  SARS-CoV-2 epitope
TPSGTWLTYTGAIKL

SEQ ID NO: 1378 - protein, 15 aa, Artificial Sequence
  Description of Artificial Sequence: Synthetic peptide
  SARS-CoV-2 epitope
PSGTWLTYTGAIKLD

SEQ ID NO: 1379 - protein, 21 aa, Artificial Sequence
  Description of Artificial Sequence: Synthetic peptide
  SARS-CoV-2 epitope
SGTWLTYTGAIKLDDKDPNFK

SEQ ID NO: 1380 - protein, 15 aa, Artificial Sequence
  Description of Artificial Sequence: Synthetic peptide
  SARS-CoV-2 epitope
GTWLTYTGAIKLDDK

SEQ ID NO: 1381 - protein, 15 aa, Artificial Sequence
  Description of Artificial Sequence: Synthetic peptide
  SARS-CoV-2 epitope
TWLTYTGAIKLDDKD

SEQ ID NO: 1382 - protein, 15 aa, Artificial Sequence
  Description of Artificial Sequence: Synthetic peptide
  SARS-CoV-2 epitope
WLTYTGAIKLDDKDP

SEQ ID NO: 1383 - protein, 15 aa, Artificial Sequence
  Description of Artificial Sequence: Synthetic peptide
  SARS-CoV-2 epitope
LTYTGAIKLDDKDPN

SEQ ID NO: 1384 - protein, 15 aa, Artificial Sequence
  Description of Artificial Sequence: Synthetic peptide
  SARS-CoV-2 epitope
TYTGAIKLDDKDPNF

SEQ ID NO: 1385 - protein, 15 aa, Artificial Sequence
  Description of Artificial Sequence: Synthetic peptide
  SARS-CoV-2 epitope
YTGAIKLDDKDPNFK

SEQ ID NO: 1386 - protein, 15 aa, Artificial Sequence
  Description of Artificial Sequence: Synthetic peptide
  SARS-CoV-2 epitope
PLVSSQCVNLTTRTQ

SEQ ID NO: 1387 - protein, 15 aa, Artificial Sequence
  Description of Artificial Sequence: Synthetic peptide
  SARS-CoV-2 epitope
PAYTNSFTRGVYYPD

SEQ ID NO: 1388 - protein, 15 aa, Artificial Sequence
  Description of Artificial Sequence: Synthetic peptide
  SARS-CoV-2 epitope
VSGTNGTKRFDNPVL

SEQ ID NO: 1389 - protein, 15 aa, Artificial Sequence
  Description of Artificial Sequence: Synthetic peptide
  SARS-CoV-2 epitope
STEKSNIIRGWIFGT

SEQ ID NO: 1390 - protein, 15 aa, Artificial Sequence
  Description of Artificial Sequence: Synthetic peptide
  SARS-CoV-2 epitope
NVVIKVCEFQFCNDP

SEQ ID NO: 1391 - protein, 15 aa, Artificial Sequence
  Description of Artificial Sequence: Synthetic peptide
  SARS-CoV-2 epitope
TFEYVSQPFLMDLEG

SEQ ID NO: 1392 - protein, 15 aa, Artificial Sequence
  Description of Artificial Sequence: Synthetic peptide
  SARS-CoV-2 epitope
IYSKHTPINLVRDLP

SEQ ID NO: 1393 - protein, 15 aa, Artificial Sequence
  Description of Artificial Sequence: Synthetic peptide
  SARS-CoV-2 epitope
TLLALHRSYLTPGDS

SEQ ID NO: 1394 - protein, 15 aa, Artificial Sequence
  Description of Artificial Sequence: Synthetic peptide
  SARS-CoV-2 epitope
PLSETKCTLKSFTVE

SEQ ID NO: 1395 - protein, 17 aa, Artificial Sequence
  Description of Artificial Sequence: Synthetic peptide
  SARS-CoV-2 epitope
TVEKGIYQTSNFRVQPT

SEQ ID NO: 1396 - protein, 15 aa, Artificial Sequence
  Description of Artificial Sequence: Synthetic peptide
  SARS-CoV-2 epitope
NFRVQPTESIVRFPN

SEQ ID NO: 1397 - protein, 15 aa, Artificial Sequence
  Description of Artificial Sequence: Synthetic peptide
  SARS-CoV-2 epitope
KRISNCVADYSVLYN

SEQ ID NO: 1398 - protein, 15 aa, Artificial Sequence
  Description of Artificial Sequence: Synthetic peptide
  SARS-CoV-2 epitope
KLPDDFTGCVIAWNS

SEQ ID NO: 1399 - protein, 15 aa, Artificial Sequence
  Description of Artificial Sequence: Synthetic peptide
  SARS-CoV-2 epitope
STPCNGVEGFNCYFP

SEQ ID NO: 1400 - protein, 15 aa, Artificial Sequence
  Description of Artificial Sequence: Synthetic peptide
  SARS-CoV-2 epitope
FNFNGLTGTGVLTES

SEQ ID NO: 1401 - protein, 15 aa, Artificial Sequence
  Description of Artificial Sequence: Synthetic peptide
  SARS-CoV-2 epitope
KKFLPFQQFGRDIAD

SEQ ID NO: 1402 - protein, 15 aa, Artificial Sequence
  Description of Artificial Sequence: Synthetic peptide
  SARS-CoV-2 epitope
GTNTSNQVAVLYQDV

SEQ ID NO: 1403 - protein, 15 aa, Artificial Sequence
  Description of Artificial Sequence: Synthetic peptide
  SARS-CoV-2 epitope
TWRVYSTGSNVFQTR

SEQ ID NO: 1404 - protein, 15 aa, Artificial Sequence
  Description of Artificial Sequence: Synthetic peptide
  SARS-CoV-2 epitope
NSPRRARSVASQSII

SEQ ID NO: 1405 - protein, 15 aa, Artificial Sequence
  Description of Artificial Sequence: Synthetic peptide
  SARS-CoV-2 epitope
ASQSIIAYTMSLGAE

SEQ ID NO: 1406 - protein, 15 aa, Artificial Sequence
  Description of Artificial Sequence: Synthetic peptide
  SARS-CoV-2 epitope
VTTEILPVSMTKTSV

SEQ ID NO: 1407 - protein, 15 aa, Artificial Sequence
  Description of Artificial Sequence: Synthetic peptide
  SARS-CoV-2 epitope
TSVDCTMYICGDSTE

SEQ ID NO: 1408 - protein, 15 aa, Artificial Sequence
  Description of Artificial Sequence: Synthetic peptide
  SARS-CoV-2 epitope
TQLNRALTGIAVEQD

SEQ ID NO: 1409 - protein, 15 aa, Artificial Sequence
  Description of Artificial Sequence: Synthetic peptide
  SARS-CoV-2 epitope
DPSKPSKRSFIEDLL

SEQ ID NO: 1410 - protein, 15 aa, Artificial Sequence
  Description of Artificial Sequence: Synthetic peptide
  SARS-CoV-2 epitope
PFAMQMAYRFNGIGV

SEQ ID NO: 1411 - protein, 15 aa, Artificial Sequence
  Description of Artificial Sequence: Synthetic peptide
  SARS-CoV-2 epitope
DSLSSTASALGKLQD

SEQ ID NO: 1412 - protein, 15 aa, Artificial Sequence
  Description of Artificial Sequence: Synthetic peptide
  SARS-CoV-2 epitope
AEIRASANLAATKMS

SEQ ID NO: 1413 - protein, 15 aa, Artificial Sequence
  Description of Artificial Sequence: Synthetic peptide
  SARS-CoV-2 epitope
PQIITTDNTFVSGNC

SEQ ID NO: 1414 - protein, 15 aa, Artificial Sequence
  Description of Artificial Sequence: Synthetic peptide
  SARS-CoV-2 epitope
DSLSSTASALGKLQD

SEQ ID NO: 1415 - protein, 15 aa, Artificial Sequence
  Description of Artificial Sequence: Synthetic peptide
  SARS-CoV-2 epitope
AEIRASANLAATKMS

SEQ ID NO: 1416 - protein, 15 aa, Artificial Sequence
  Description of Artificial Sequence: Synthetic peptide
  SARS-CoV-2 epitope
PQIITTDNTFVSGNC

SEQ ID NO: 1417 - protein, 15 aa, Artificial Sequence
  Description of Artificial Sequence: Synthetic peptide
  SARS-CoV-2 epitope
KSAFQSSVASGFIGF

SEQ ID NO: 1418 - protein, 15 aa, Artificial Sequence
  Description of Artificial Sequence: Synthetic peptide
  SARS-CoV-2 epitope
ISGYNFSLSAAVKAG

SEQ ID NO: 1419 - protein, 15 aa, Artificial Sequence
  Description of Artificial Sequence: Synthetic peptide
  SARS-CoV-2 epitope
IEYAKLYVLSPILAE

SEQ ID NO: 1420 - protein, 15 aa, Artificial Sequence
  Description of Artificial Sequence: Synthetic peptide
  SARS-CoV-2 epitope
FSLSAAVKAGASLID

SEQ ID NO: 1421 - protein, 15 aa, Artificial Sequence
  Description of Artificial Sequence: Synthetic peptide
  SARS-CoV-2 epitope
SLINSMKTSFSSRLL

SEQ ID NO: 1422 - protein, 15 aa, Artificial Sequence
  Description of Artificial Sequence: Synthetic peptide
  SARS-CoV-2 epitope
LLNNQFGTMPSLTLA

SEQ ID NO: 1423 - protein, 15 aa, Artificial Sequence
  Description of Artificial Sequence: Synthetic peptide
  SARS-CoV-2 epitope
GLVSQLSVLSSITNI

SEQ ID NO: 1424 - protein, 15 aa, Artificial Sequence
  Description of Artificial Sequence: Synthetic peptide
  SARS-CoV-2 epitope
YDMFNLLLMKPLGIE

SEQ ID NO: 1425 - protein, 15 aa, Artificial Sequence
  Description of Artificial Sequence: Synthetic peptide
  SARS-CoV-2 epitope
LIEDYFEALSLQLSG

SEQ ID NO: 1426 - protein, 15 aa, Artificial Sequence
  Description of Artificial Sequence: Synthetic peptide
  SARS-CoV-2 epitope
IIKYNRRLAKSIICE

SEQ ID NO: 1427 - protein, 15 aa, Artificial Sequence
  Description of Artificial Sequence: Synthetic peptide
  SARS-CoV-2 epitope
NKVKSLRILNTRRKL

SEQ ID NO: 1428 - protein, 15 aa, Artificial Sequence
  Description of Artificial Sequence: Synthetic peptide
  SARS-CoV-2 epitope
AWENTTIDLTSEKPA

1. An isolated peptide comprising an immunodominant SARS-CoV-2 T cell epitope comprising an amino acid sequence selected from the group consisting of SEQ ID NOs: 286, 288, 324, 326, 327, and 328, wherein the peptide is no more than 100 amino acids in length, and an optional pharmaceutically acceptable carrier.

2. The isolated peptide of claim 1, wherein the T cell epitope is a CD8+ epitope.

3-11. (canceled)

12. The isolated peptide of claim 1, wherein the peptide is no more than 20 amino acids in length.

13. The isolated peptide of claim 1, wherein the amino acid sequence of the peptide consists essentially of or consists of an amino acid sequence selected from the group consisting of SEQ ID NOs: 286, 288, 324, 326, 327, and 328.

14. The isolated peptide of claim 1, wherein the peptide is presentable by a major histocompatibility complex (MHC) Class I.

15. (canceled)

16. The isolated peptide of claim 1, where the peptide is synthetic.

17. (canceled)

18. A pharmaceutical composition comprising one or more peptides of claim 1 and a pharmaceutically acceptable carrier or excipient.

19. (canceled)

20. A pharmaceutical composition comprising one or more nucleic acids encoding one or more peptides of claim 1, and a pharmaceutically acceptable carrier or excipient.

21. The pharmaceutical composition of claim 18, further comprising a liposome or a lipid nanoparticle, wherein the one or more peptides are disposed within the liposome or the lipid nanoparticle.

22. (canceled)

23. The pharmaceutical composition of claim 18, further comprising an immunogenicity enhancing adjuvant.

24. The pharmaceutical composition of claim 20, wherein the one or more nucleic acids are synthetic.

25. A vaccine comprising the pharmaceutical composition of claim 18, wherein the vaccine stimulates a T cell mediated immune response when administered to a subject.

26. The vaccine of claim 25, wherein the vaccine is a priming vaccine and/or a booster vaccine.

27. The vaccine of claim 25, wherein the vaccine is a pan-coronavirus vaccine.

28. (canceled)

29. A method of stimulating a T cell immune response to SARS-CoV-2 in a subject, the method comprising administering to the subject an effective amount of the pharmaceutical composition of claim 18.

30. The method of claim 29, wherein the subject expresses an MHC Class I that binds the epitope.

31-42. (canceled)

43. A method of presenting a T cell epitope on the surface of an APC, the method comprising contacting the APC ex vivo with the peptide of claim 14, wherein the APC expresses the MHC Class I.

44. A method of presenting a T cell epitope on the surface of an APC, the method comprising transfecting the APC ex vivo with a nucleic acid encoding the peptide of claim 14, wherein the APC expresses the MHC Class I.

45. The method of claim 44, wherein the nucleic acid comprises an mRNA.

46. A composition comprising an isolated APC that expresses an MHC Class I and presents on an outer cell surface of the APC the peptide of claim 1, and an optional pharmaceutically acceptable carrier.

47. The composition of claim 46, wherein the APC is a dendritic cell, monocyte, macrophage, B cell or an artificial APC.

48. (canceled)

49. A method of producing activated T cells, the method comprising contacting a population of T cells in vitro with the composition of claim 46 to permit activation of one or more T cells in the population for reactivity to a SARS-CoV-2 infected cell, wherein the T cells comprise CD8+ T cells.

50-52. (canceled)

53. A method of stimulating a T cell immune response to SARS-CoV-2 in a subject, the method comprising administering to the subject a composition comprising a population of activated T cells produced by the method of claim 49, wherein the subject expresses the MHC Class I.

54. The composition of claim 46, wherein:
(a) the peptide comprises the amino acid sequence of SEQ ID NO: 328, and the MHC Class I is HLA-A*01:01;
(b) the peptide comprises the amino acid sequence of SEQ ID NO: 286, and the MHC Class I is HLA-A*02:01;
(c) the peptide comprises the amino acid sequence of SEQ ID NO: 327, and the MHC Class I is HLA-A*01:01;
(d) the peptide comprises the amino acid sequence of SEQ ID NO: 326, and the MHC Class I is HLA-B*07:02;
(e) the peptide comprises the amino acid sequence of SEQ ID NO: 324, and the MHC Class I is HLA-B*07:02; and/or
(f) the peptide comprises the amino acid sequence of SEQ ID NO: 288, and the MHC Class I is HLA-A*02:01.

55-56. (canceled)

57. The method of claim 25, wherein the subject is at risk of infection by SARS-CoV-2.

58-73. (canceled)

74. A composition comprising an isolated T cell that binds the peptide of claim 1, and an optional pharmaceutically acceptable carrier.

75-78. (canceled)

79. The composition of claim 74, wherein the T cell is a CD8+ T cell.

80-89. (canceled)

90. An engineered T cell receptor (TCR) having antigenic specificity for a SARS-CoV-2 antigen, the TCR have an alpha chain and a beta chain, wherein:
(a) the SARS-CoV-2 antigen comprises a T cell epitope comprising the amino acid sequence of SEQ ID NO: 286 presented by HLA-A*02:01, and the TCR comprises the CDR3 alpha and CDR3 beta sequences of TCR_22, TCR_27, TCR_47, TCR_65, TCR_69, TCR_77, TCR_84, or TCR_107 set forth in Table 5;
(b) the SARS-CoV-2 antigen comprises a T cell epitope comprising the amino acid sequence of SEQ ID NO: 288 presented by HLA-A*02:01, and the TCR comprises the CDR3 alpha and CDR3 beta sequences of TCR_5, TCR_7, TCR_14, TCR_16, TCR_20, TCR_28, TCR_33, TCR_43, TCR_45, TCR_63, TCR_70, TCR_81, TCR_86, TCR_88, TCR_90, TCR_94, TCR_98, TCR_99, TCR_102, TCR_103, TCR_106, TCR_108, TCR_113, or TCR_123 set forth in Table 5;
(c) the SARS-CoV-2 antigen comprises a T cell epitope comprising the amino acid sequence of SEQ ID NO: 324 presented by HLA-B*07:02, and the TCR comprises the CDR3 alpha and CDR3 beta sequences of TCR_16, TCR_22, TCR_27, TCR_65, TCR_97, or TCR_107 set forth in Table 5;
(d) the SARS-CoV-2 antigen comprises a T cell epitope comprising the amino acid sequence of SEQ ID NO: 326 presented by HLA-B*07:02, and the TCR comprises the CDR3 alpha and CDR3 beta sequences of TCR_11, TCR_112, or TCR_122, set forth in Table 5;
(e) the SARS-CoV-2 antigen comprises a T cell epitope comprising the amino acid sequence of SEQ ID NO: 327 presented by HLA-A*01:01, and the TCR comprises the CDR3 alpha and CDR3 beta sequences of TCR_26, TCR_53, or TCR_54 set forth in Table 5; or
(f) the SARS-CoV-2 antigen comprises a T cell epitope comprising the amino acid sequence of SEQ ID NO: 328 presented by HLA-A*01:01, and the TCR comprises the CDR3 alpha and CDR3 beta sequences of TCR_25 or TCR_41 set forth in Table 5.

91-101. (canceled)

102. A pharmaceutical composition comprising an engineered T cell and a pharmaceutically acceptable carrier, wherein the engineered T cell comprises one or more exogenous nucleic acid sequences that encode a TCR having antigenic specificity for a SARS-CoV-2 antigen, the TCR have an alpha chain and a beta chain, wherein:
(a) the SARS-CoV-2 antigen comprises a T cell epitope comprising the amino acid sequence of SEQ ID NO: 286 presented by HLA-A*02:01, and the TCR comprises the CDR3 alpha and CDR3 beta sequences of TCR_22, TCR_27, TCR_47, TCR_65, TCR_69, TCR_77, TCR_84, or TCR_107 set forth in Table 5;
(b) the SARS-CoV-2 antigen comprises a T cell epitope comprising the amino acid sequence of SEQ ID NO: 288 presented by HLA-A*02:01, and the TCR comprises the CDR3 alpha and CDR3 beta sequences of TCR_5, TCR_7, TCR_14, TCR_16, TCR_20, TCR_28, TCR_33, TCR_43, TCR_45, TCR_63, TCR_70, TCR_81, TCR_86, TCR_88, TCR_90, TCR_94, TCR_98, TCR_99, TCR_102, TCR_103, TCR_106, TCR_108, TCR_113, or TCR_123 set forth in Table 5;
(c) the SARS-CoV-2 antigen comprises a T cell epitope comprising the amino acid sequence of SEQ ID NO: 324 presented by HLA-B*07:02, and the TCR comprises the CDR3 alpha and CDR3 beta sequences of TCR_16, TCR_22, TCR_27, TCR_65, TCR_97, or TCR_107 set forth in Table 5;
(d) the SARS-CoV-2 antigen comprises a T cell epitope comprising the amino acid sequence of SEQ ID NO: 326 presented by HLA-B*07:02, and the TCR comprises the CDR3 alpha and CDR3 beta sequences of TCR_11, TCR_112, or TCR_122, set forth in Table 5;
(e) the SARS-CoV-2 antigen comprises a T cell epitope comprising the amino acid sequence of SEQ ID NO: 327 presented by HLA-A*01:01, and the TCR comprises the CDR3 alpha and CDR3 beta sequences of TCR_26, TCR_53, or TCR_54 set forth in Table 5; or
(f) the SARS-CoV-2 antigen comprises a T cell epitope comprising the amino acid sequence of SEQ ID NO: 328 presented by HLA-A*01:01, and the TCR comprises the CDR3 alpha and CDR3 beta sequences of TCR_25 or TCR_41 set forth in Table 5.

103-107. (canceled)

108. A method of ameliorating a symptom of SARS-CoV-2 infection in a subject in need thereof, the method comprising administering to the subject an effective amount of the pharmaceutical composition of claim 102, thereby to ameliorate the symptom.

109-128. (canceled)
